United States Patent Application Publication US 2022/0098646 A1 - sequence listing, part 2

SEQ ID NO: 1 - DNA, 5488304 bp, Klebsiella pneumoniae (residues 1,829,436-3,658,870 of 5,488,304)
  misc_feature: Chromosome DNA
tatcgaccttgagtttgtcgtttggcagcgtcttgctggcctggcgcagcggcggggcaaaaccttgtctgaaaccatcgtccagctgattgaagatgccgagcacaaagagaaatatgccagcaaaatgtcgagcctgaagcacgatctgcaggtactgttagggaaagaatagccaggtaggatcgtcgacccgcctgccggtggttgccctggccgggggctgcttcacagctctcagccgctgaagtgggcgagagggcataaaaaaaacccgccgaagcgggtttttttatcggttataacttaagccgccggctgagttacaacttctttgtagcctttaacttcgatctctacacgacgatccggagccaggcaatcgatcagggcagcgcgagctttcacgttgtcacaggtgttgccagtaaccgggttggattcacccatgccgcgagcggagattttgccagccgggatgcctttagcaaccaggtagtcaacaacggactgagcacgtttctcagacagctgctggttgtaagcttcggaaccgatgcggtcggtgtagcccagaacaacagcggaaccgtctttcggatccatgttgctcagctgagtgtacagctgatccagagcctgctgaccttccggtttcagggtagctttgttgaagttgaacagaacgtcagacttcagggtgaagtgcttggtagccacttccggagccggagccggagccggagcaacaaccggtgcagcatcttcctgaccgaagcggtaggaaacgcccaggctcagcatgccgttatcaggacgggtacccacagtgcccgcgtcgccgatgttgttaacccactggtattccagacgggtagcgatgtcacgagtaacagcccactctacgccgccagcaaatactggggaaacgccagtgtcgtgttcgctacgggaaacgccggtagaagcgtagttgcctttggagtcagcgcgccaaaccatgccgcccagacgggtgtagatgtccagatcgtcagtgatcgggtaacccagtttagcggtcagctgaacgccctgagctttgaaagcaccgttgtcaacgctgcctttatatgccatacggcccagccagtcataacccatttcgaaaccgaggtacgggttaacctggtaaccaccaaacgcaccagcaccaagctgatcgttacgggtcggaccgttgttgttctggaaaccgttaccgtagaaaccggtgtcgtgatactgggaccaacccagtttaccacctgcataccaggtgttatctttcggagcggcctgcgctacggtagcgaagccagtcagtgccactgcaatcgcgatagctgtctttttcattttttgcgcctcattatcatccaaaattcgccatgaagttacaaaagacctcacggttaaatccttcaccgggggcgtgacttgttgttaactatgctgatacatgcagcgtaagccgatcacccctggcgatgtaaagtctacaacttagttcgaaacttacaagtgtgaactctgtcaggcatatgaaaaaaaagggttgtgtacacaatatttaacaaatatggttgattttcgtacacgaaaaaaagacagaaatccccgtgtggcaggcattccgcgaaaaagaccataaaaaacgctgtacctttcccagcggtaaaaaaaattccaggaataatcctaatttcactcaatgatacaaatttgagtgaatttttagcccgctgagttgtctgccgagcgtgccctgatttcgcaccgggcgcatgatgaatcccatcgcggaccctacctgggcagcgttaacgagacgttcgtgttcgtcagcggttaactcctccgccagccagcagataaccacactataattacccgtgcgcagggcacggatcattgagtctatggtatggctgggagagagctggctaatttgcatgaccttggacagcggcagaccggcggactgaacccattcgcggctgagcttttgttgcggcgtgagccacagctgccagcgcgactgttgacccagctgctgtaataaaggtagcagcaataactgcgtcatcatgggttgatcttcacgatagacaatttcactgatcagcccattggtgttctgttcgccagaacgatgagcgtagtggcctgccggagcagaagcctgtgctgaacggtttgcgtgagctgaagtaaacatagtctatcccgcctttagttactgtatgcatatacagtatcttcgccaggggaaaagatcaaccgcaatttgccattttgctgccgggaatttaatcgcttctcgtggttccgtatctgtcaagagaagcccctgcattatccaatccttaacgcgcgctaatggtttcatttctccctgtcgattgctgcaacgcttgcgattttctgaaagcgtctcgcaaaaccgcattctggtgaaaaagtcggcgaaaatcatcttgctgctgcccgggaagtcccttatgttttctcttagcggatccgttaacaacttaagtttaattacatgattaacaaaggaatgatcatgagaaaactagtttgtccgcggctcccgcaatttcaggcctgcgtctcaccgctgggtcaactgcatactcgtccgctctttggcggctacagcctggctattgatgatacggtgtttgcgatggtggccgaggggaacatttatctgaaggcctgcgagcagagcgctgcttatcgggtggaacatcgtaatcctctgttaacgctgcgccgacacggccgcatagtgccgctgaagtattatcaaattgacgacactttatggcgcgatgagcagcagctttttcggctatcgctactgtcgtggcagagtgcgcagcgcgaaaagaactaccgacgggcgtcgggccgcctgaaggatttacccaatatcagctttcatatggaattgcagctgattcacgcgggcataccggacgttaggacgttgcgggaagttggtgcgcaggaggcatggctgaggctacgcgtaaataatgcttctttatcgctgagcgtattgctggcgctggagggggcgattgccggggtacatgccgccgcgctcccgacgccacggcgtcaggagcttctcgaatgggcggctacccggtagcggaaaagccttgttattcggtttgggcgtggacccgttgctgcaggcggcagatttcaggcagcagcgccagcagcaggccaatctgctgtaagaccaagggttccttactgtccgcgcgcggttccagatgatggatccggctttgcaggctgttcaaagcctgttgcacccgctgttcatccgcgggggtatgatgcaaggcatcatccacataacagactgcatcatccagcagggcgaggatttccggcgtggacagtttttcccgatgcgcgccaagagcggagatatagctggtgaacgtgtggttgaggcatagcagacgaaaggcggtttctcgctgggtggcatccgcgcgtggttcagtcgataagttcgagacgacggaggccagctcagcatcacggttgtaggcgtcacgacgcgcgacacggtaggccagccggttgtcgcggccctgatgatactgctccagaatcgcgtccagatagcggcagttcgcgttcattgcccggtccagcacccgcggcaggttgcggaatttccagtccggccagatgaagctgaccgctgcccaggcgatggcgcagccgatcagcgtatcaatgatacgcggcagcgcgacttcaaagccctcgccaagcaggttaaagcacagcagcaccagcagcgtaataaacatcgtggcatgggcgtactgcacgttacggaaggcaaaaaacagcacgccggtcaggacgatcaacagcagttgcccttcaacagagggaaccagcagcaggaccggcaggccgatcgccaccccaaccagcgtgccgataatccttagcgccaggcgatggcgggtggcgttatagttcggctgacagacgaacaggctggttagcaggatccagtagccatgctggagcccggtaaactggataaaggcatagccggcgcagagcaccaacgacatacgtactgcgtggcggaaaagggccgactctggcgacatattgcgctgcaggcgcagccagatatcgctcagaccgccaagtctgtcgtcggccagcagcgtctcggtattactcccggcaggcgcggtggtttgcaccgattcaatggtggccagctgagcatcgatagcgcgcaggttattcagtaaataccctagggcgttgagctgctcgtcggatgcgccgccggcgcgcacgcgctcaagtgccgcatcgagatgcatgaacgcccgttcaaaatgggcatcatgctgatagggttcgcgtaacagaatcgcccgcgacagtttctggcaggcctgcgcctgcatcgaaagcattcgctggaaacggaacatcacatcgctatagcgaaattgatcgcgtagggtttgatactgaatatgcgatgagctggcgcgttcatgaatatcctgggccacaaagtagtactgcagggtgcggcgggtgccgcgctggccccgatcgcctcgcagtcgggttagcagcgagaccttggtttggttaagcgtagctaccagctggccattagcgagcgccagatcgtacagcggcgcctggctctcatcctcaaggtcaggatcaaacagccgggatttgagctcaagatagcgggccagctgctcatagctacgcgccaggttgtcctgcaatggacgaatcggaaagatcaggtgcccggacagcgtcagcaggttgtaccacactgcccccgccagcaggaacaacggctgcagataccaatgatcgtacagcgtgacgccgagcatggtgtagatggcgataagcagggcgccgaaggcaatggtcgcatagcgctgaccgaggccgccaagcaaaataaagccgatggtagacacggttaaaccaagggcaaacagcggcggccacggaaacagcagctccacggaggcggaggcgataaaaaagcaaaccagagtaatggcaagattacgcagacggccagccagacggtcgtcaaggtcggtcagagccgcagccacgacgccgagggtgagggggatggtcagtttgacttcgccgatccaccagggaaacagcgttgtgccgcagagcgcgataaaaattcgtacgttataaagccaggcgctgttccaggtgtagcggcgtagcagggggctaatcatgtccgtgttccgttctgttactgaaagcgacgacgcgcattggcttcacgcgcagcacgcgcggtttccacagaaacgacccggcgacccaccggccagagggcgatggcggcgattttgaaattcgcgatccccaccgggatgcctatgatagtcaggcactgagctataccgctgaaaatgtgcatcaggcagagccaccagccgaaaaaaatgaaccacagaatgttcagaacggtaccgccggcgttcagtagaccgtttttgcgccccggctcgagctcgtcaacatgaatcgcctcgttaccgtagggaaataacgaaaggcgagtgatttcccagcaggaacgagtcagcggcagcgtgacgatcagaatgatgctgaccagggtggcgagtagccagcctagagtggtggcgaaaccgccaaggataaagttcaaaatattcagaatggtacgcataaagcctcggttttgcccggtggataataagacctgatgattgtaacgtttttttgcgctggagcacctggtccggggcggttaaactgaaaaacaatccaccctgattgaaaatcgacattatatggaacttaaagcgacaacattgggcaaacgcatggctcagcacccttatgatcgggtgcagctactgaacgccggggtaaaagtttccggcgatcgtcatgagtatcttatacctttcaatcagttattgtcagtgcattgtaagcgcggtctggtctggggcgaactggagtttgtgctaccggacgcgaaagtcgtgcgtttgcacggtaccgagtggagcgaaacgcagcgcttttatcatcatttacatacgctctggcagcagtggagcacggagatgagcgatatcgccgccggcgtgctgaagcagcagctggcgacgatcgagcacactcgcgcagaaggcaagtggctaacccgtcagcaggtggcggatgttcaggataatatacgccatgcgttgactggtttgccgatgcccaccagtcggcttgatgcctttgataactgccgggagctgtggcgggagtgtcagcgctggttaggcgatattgaagcgacgcgtctggcccataaccaggcctttaccgaggcgatgctggagcaatatcgcgaattttttgatagcgttgagtcgtccccgctcaatgcgtcacaagcgcgtgcggtagtgaacggcgagcgctccctgctggtgctggcgggagcgggcagcggtaaaacctcggtactggtggcgcgagcgggctggctgctggcgcggggagaagccgcggcagatcaaattttgctgctggcattcggccgccaggcggcgcaggaaatggatgagcggatccgcgagcgtctggcatcagatgatattaccgcgcgtactttccattcgctggcgttgcatattattcagcagggcagcaaaaaagtgcccactatcagtaagctggaaagcgatactgcggcccgccacgcattgctgctgaaaagctggcaaaagcagtgccaggagaaaaaagcgcaggcgaaaggttggcgcctgtggctggaagaagagatgggctggcaactgccggagggggacttctggcaggacaaaaaggtgcagcggcggatggccagccggcttgaccgctgggtgagcctgatgcgcatgcacggcggctcccaggcggagatgattgccggggcgccggaagcggtacgcgacctgttcagtaaacgggtgaagctgatgtcgcctctgatgaaagactggaaagcggcgctcaaggccgagaatgcggtcgatttttccggcctgatccatcaggcggtcaatattctcgataaaggccgcttcgtcagcccatggaaacacattctggtggatgaatttcaagatatttcgccgcagcgagcctcgctgttggccgcgttacgccggcagaatagccaaaccacgctctttgccgtcggggatgactggcaggcgatctatcggttcagcggggcgcagctttctctgaccaccgcattcaaccactactttggcgaaggggattgctgtgcgctggataccacctatcgctttaacgggcgtatcggcgaaatagccaatggctttatccagcaaaatccgcatcagttaagcaaaccgctgaacagccttatggcaggtgataaaaaggccgtcacgctgttagccgacgacaagctggacgatcttctggataagctgagcggttacgttaagcccgagcagcgcatcctgctgcttgcccgttatcaccatctgaagcctgaggcgctcaacaaagcggcgacgcgctggccgcacctgcagcttgattttatgacgattcatgccagcaaaggtcagcaggctgactttgtcattgtgttgggactacaggatggggaggatgcgtttccggccccggcgcgcgagtcgattatggagcaggcgctcctgccgcagccggaagattttccggatgcggaggagcgtagactgttgtacgtggcgctcacccgcgctcgtcaccgggtatggctgttatttaacaaggcgcaaccttcgccgtttgtcgagatcctgcaggcgctggatgtgcccgtggccaggaagccgtaatcgcggctcgattatttcaggcgctcggcaagatagcgtggataatccgggatcagaatatcgagcggttgaccgaagtgcggcgactggataataaagtcagcggtggagacgttagtggcgaccggaatgttccagacggtggccaggcgcagcaacgctttgacatccgggtcgtggggaacggcgttcagcggatcccagaagaagatcagcacgtcgattttgccttctgaaatgagggcacccacctgctggtcgccgcccatcggaccgctcagcatggcattaacctccaggccggtagcccgggagacgagattaccggtagtgccggtagcatacaaaatatgttgcgccagcagcgcctgatggcgagcaacccatttcatcagcatatctttgcagtgatcgtgagccaccagcgcgatatgtttttgcgcaggcagggtacgtgttgtcagttccatattttcattccacattttgacctgcaaacagattactgaatgtggctgtcgctgcaagcatcggggatgaaaattttgctgaatctgtgggttaggctggatggccccctgctgcggattagcatacacttaagtgaaatagcaggaggaaaccatgaaagagaatgatattgctggcatcctgacctcgacacggacgattgcgctggtcggagccagcgacaagcctgaccgtccgagctaccgggtcatgaagtatctgctggatcaggggtatcacgttatcccggtttcgccgaaggtggcgggcaagacgctgctgggacaacaggggtatgcgacgctcgccgacgttccggaaaaggtcgacatggttgatgtcttccgtaattcagaagcggcgtggggtgtagcgcaggaggcgatagccatcggcgcgaaaacgctatggctgcagctgggggtgatcaatgagcaggctgcggtgctggccagggaagccggattgaacgtggtgatggatcgttgcccggccattgagctaccgcgactgggattagcaaaataacaaaaaaccccgcctggcggggttttgttttagttgcgaaggcgcggagcctgcagctgctgacgaatcgttttggccagttcgtcaagggacggctgttccgggtgttcgtcgcgggtttcgctgctcagctgcgcttctgccagataggtgtgaatcggctggccatcatcatcttccatcaccacatggtaccagggcgccgcgcgcagttcgtcattggcggcaatttcatcctcttccggctccgcgagcgaatactcgggatcgacatcgacgatgacgcccaggtagcccaagagcgtatggcggacctgttggccgataccgaatttgctggctatcataggcacctcctgggaaacatgaatactccctatatgaggctcatgtttcgtttttcaagttacatgacgcgacaggcaaaccccttcagatacagcccttccgggtaggttgcgatcaccgggtggtcggcagcctgacggaactgttctataaattgtacatcacgcccggcatcaattgcggcatcggcgatgattttctgaaataaatcggtggtcatcagcccggagcaggagaatgtcagcagcacgccgccggggttcagcagctggatcgccagcatattgatatctttatagccgcggcaggcgcccatcagctggcttttattttccacgaacttcggcggatccatcacgatcacgtcgaatttctctccctgatcgcggtatttacgcagcagtttgaacacgtcgtcgcgcacaaactccgctttggacagatccagtccgttgatctccacgttctggcgggcaacgtcgagcgcctcctgagaggtatccacgctggtgacctggcggcagccgcccatcagcgccgacaccgcaaagccgccggtgtaggagaagcagttcagcacccgtttatccgcgacatagcggcgggtggccaggcggctgtcgcgctggtcgaggtagtagccggtcttgtgcccgccctggatatcgaccaacagcttcatgccgtgctcggtgatcggcagcagcgccgggggcagttcgcccaccaccggcccctgggccagctccagtccctcttttttacgcacggcgacatcgctgcgatcgtaaatggcgcagtccgggaacaggttctgcagggcgctgatgatggcggcgcgctggtattcggcgcctgcgctgagcagctgcagcacgaaaaagttgccaaagcggtcgatagtgacgcccggcaggccatcggactcgccggcgatcaggcggtagctgtcgaggccatcgcgctcggccagccaggcacgccaggtttgcgcctgctgcagacggcgttcaaagaaggcgctatcgatggcttcattgcggtcgaaggtccacacgcgggcgcggatctgcgacgacggcgagtaagcgccgcgggccagccattttccctgatggtcaacgatatcgatggtttcaccgctgcgggctttaccttccatgcgggcgacgccgccggagaatatccacggatggcgacgcagcagggatttctcgcgtcctttggctaacactaagcgggggaatagggaatctgtcatggggctacctttaagcaacgggaatgtcggcaccgaaaaatggcgcgtagattagcacacctggcgcacgcaagcatctttcgcccggcaggcacaggtgagcgtttcggcacaaaatgcaggcgcttcggcacattcagctggtgcggactctcataccctgttttctcaccccaacgaggagcagacgatgaaaacaggtatccgcatggctgtggcgatggtagcggctgtgagcagcggcgcgatggccgcgccgtttagcgtaagcagcaatgatatgcgtgacgggcagccgctggcccagcagcactggtttgccggtttcggctgtaccggaggcaatgtctctccgcagctggcatggaaaaacgccccggcgggcacgcgcagcttcgcggtcaccgtccaggatcccgatgcgcctaccggcagcggctggtggcactggacggtggtcaatatcgccagcagcgtcttttcgctgcccgctggcgcgggagataaaaacagcgctacactgccgggcggagcggtccagggccgcaacgattttggctatgccggcttcggcggcgcctgtccgccggcgggagataaaccgcaccgctatcgctttacggtatgggcgctggatgtccccacgctgccggtggatgccggggccagcggggcgctggtcggctatctgttacatagccatgctctcgccagcgcacagttgacggcgatggccgggcgttaaaataaaaggttggtctgatggagagtatccactttcagcataacgccttaaccgcggcggagatcaccacccgacggctatgcagactgcatcgcgtgcggctgttctccccggcgctctgtcgggtgaaacgcggcagcaaagtgattgtgcaaggggagagccgggtgctggcgactccgcaacagctgattgttttgccagctgacgtggaactggaggtgattaaccagccggagaatggcctcttttgctccgatctgctatcgctgacgcccgagttgctgacgaggtttaagactcgttatctcagcgaaccaccgccagggcgcctgacctcgctctgcgcaccggtgacgacagagctggcgtttatgtggcaaagcgttctgcaggcggtgcgggagggattgtccgtcgcgctgcagcagcaccagaccatgggactgctgctggccctgtatgaggctggctatgcgggcccgctgctcgtcgagcggcagcaggatctgtcggcgcaggtgcggcagctgattatgctgtcgccggcgcaggcatggagcgtgtcgcgggtggcgaaaatgctctttctcggcgagtccacgctgcgccgtcggctgcagcaggaatcgcagagttttcgccagatcgtcgaggaggtgcggatggcccacgccctggggcagctgcagaccacctcgcggccaataggcgaaattgcgcagaacagcggatatcagtcgggatcgcgctttaccgcgcgcttccgtcagcattatggtttactgccgaagcatgtacgctgagcgaatttgctatcctcagcgtatagcgtgagcgaaaaggagatgattatggccagtatctgcacaatggcatgggtttacggttcggttcagggcgtgggatttcgctattccacgcagcgggaagcgctgcagctgggggtgaccggttatgcccgtaatctggatgacggcggggtggaagtgcttgcctgcggcgaggcggagcaggtggaaaaactcatcgcctggctgaaagccggggggccgcgcagcgcgcgggttgaccgagtgttaaccgagccccatcaacccacccgcagctgggacaaattcgcgatcctctattagatgcacttcaccggcttcggcaagccggcgattttggtcgcctgtttggcgggtcctttcgggaacaggcgatagagatagcggctgttgcctttctcttcgccaaacttgttggccatcgccttgaccagcatacggatcgccggagaggtgttaaattcaaggtaaaactcgcgcacaaagcgcactacttcccagtgttcaacggcgagcgttatcccttcctgcgcggcaatgacttccgccatcgcctcgctccactgggtggtatctttcagatagccttcgctatccgtttcaatttcgttgccttcaaaaataaacatgatttttcacataccgcctgaaactggccgcagtgtagcaaaaaaaaaggccccgcataagcgaggcctctgttaagcagggaagcggttagtcccggctggcgaagcccaggatgctcagcaggctgacaaagatgttgtacagcgagacatacagactgaccgtcgcgcggatatagttggtttcaccgccgcggataatgttgctggtctcgaacaggatggcgcccgaagagatcaggatgaacaccgcgctaatcgccaggtgcagcgccggcagctgcaggaacaggttagcgaccataccaatcaggacgaccaccacgccggccatcagcatcccgccaaggaatgacatgtctttacgcgtcgtcagcacataggccgagcagcagaagaagaccagcgccgtgccgcccagcgccaggccgattaaatcgcccatgccggcagaaagatacgcgttcagcatcggcccaaggatatagccgaggaacccggtgaaggcgaaggcggaaataatcccggtgggtttattcgccgttttgtaggtcaggaacatcagaccgtacatccccacgagggtcaaaatgagacccggcgaaggtagcatcagcactgtgctggcggtggcggtgatagcggaaaacgccagcgtcaggctgagcaggaagtaggtgttacgcagaaccttgtgcgtgctgagcagcgaggaacggtcacgcgatgatgtaattatgcgatccatgagtcactctcttatgacagatgtaattagggataaagaataagaaaaacaagcgtgaagccctaatgcttttacccatctttacttagtttttaccgcttttgcctggcataaaattctatatagatagggaaaagcgatatattttcgcttttcgcgtcgctgagccgatcgaaatcttataggtcactgaaaaatattgccttattgcagttctgcgactaagtgtggaagagggggattaccccgtacgtcaaaggcaaagggaaatgacattacacaaaaaaaatcacatcacccgaacactcctggctgtcagtatgctggctatgagcggcggggcgctggcggcgcaggtgccgccgggcacccagctggcggaaaagcaggagctggtcagaaataacggcagtgaaccggcgtcactcgatccgcataaagtcgagagcgatgttgaattcaatatcattagcgatctctttgaagggctggttaacgtgtcgccagcgggagcgatccagccgcgactggcggaacgctgggaaaacaaagacaacctgttatggacctttcatttacgccccggtctgacctggtccgacagcacggccattacagcgcaggatatcgtctggagctggcaacgactggtctcgccggcaacagcctccccctacgcgagctaccctggcaatatgcatatcgccaacgcccgcgagattgccctcgggcaaaagggacccgagacgttgggggtgaaagcgctgaacgacaccacgctacaggtcactctgacccagccgaatgccgccttcctggcgatgctggcgcacccttcgctggtaccgatcgacaaagtgctggtggagcggtatgccgataaatggacccgaccagagcatatcgtcaccagcggcccgtataagctgtcccaatgggtggtgaatgagcggctggtggctgaacgtaatgcaaagtactgggataatgcgcataccgttattaataaagtgacttacctgccaatctcttcggaggccgccgatgtcaaccgctacaaagcaggggagattgatattgtctatacggtgccgatcaatcagtttgcgcagttgcagaaaaccatgggcgaccagctggacgtttcgccgcagctggcgacctattactacgaattcaatactacccggccgccgtttaacgacgcccgtgtgcgtcgcgcgctgaatatggcgcttgataaagatatcattgccggaaaagtgcttggccagggccagcgcccggcctggctgatcggtcagccggatatcggcggcgtgacgctgcataacccggactacgccagctggccgcgtgagaaacggattgccgaggcgaaaaaactgctggcgcaggcggggtatgatgaaagccatccgctggtctttaccctgctctataacacctctgagtcgcaccagcgtatcgccattgccgccagctctatgtggaagaaaaacctcggcgtcgaggcgaagctacagaaccaggagtggaagacgatgctggataccatgcatacgcataacttcgacgccgtccgctacgcgtggattgccgactacgacgatgccgccaccttcctcaatactttccgtaccggggatagcgagaacaccagtcagtacagcaaccctgcttacgatgaggccctgcgcaatgcggcgaaagcctccgacgtggcgacccggggcaaatactatcagcaggcggaagatctgctggcgcaggatgttcccgccattccggtctatcactatgtacgtacccatctggtgaaaccttgggtagggggcttcacgccggataagctggggtattactacaccaaagacatgtacattaaaaaacacccatccgccagcggcgatgggcgttgattttctgtgcaaactgcctgaaattcagacgaataacacaaaattgtttgtttttaaggcggttgatcaaaatgatgctttacagcatccgccgaggtgtttatagtgcgcctcacaccggaagtgtggccgagcggttgaaggcaccggtcttgaaaaccggcgacccgaaagggttccagagttcgaatctctgcgcttccgccatataaaagaaggggttaccgaaaggtaaccccttcttgctttgtccggtcggtcgtgcatgacccggacagcgaccgacgacgttttcattcccacagcgctgacggatacatagcccgtcgcatggcaggaattttcacaacgcccgcttattcttcgacaatccgcgccttcggtttgctcagcaggagcatgaccagcgcgacgtagggcattggcttccagaaatagtagccctgcagcagatgaatattctggcgattaagataatcccgttgggcctcggtttcgacgccctcggcaatgatgcgcagtgacagcgtccgcgccatctctatcacgcagtccagcagcttgcttgccggcgcctccccggttacccggccgacaaaactctgatcgattttgatatagtcgaaaatcagctcgtggagacaggaaagcccggaatagccggtgccaaagtcgtccagcgcgatggaaaacccgcgggagtgtaacgtattgagcttgtccacaaccgccccgttgagcaacagcggctcctgctccgtgatctccagcatcagcttcaccgctttaccctcaaagccgcgctgatagtgcaggcagtcatcgataaacgtcggcgcgttaatatgtgacacgctgatattcaggccaatatgaaacccatccggtagtttactaaagagtggtctcatctgcgcgttgacctgcgccatcaggctgcgggttaggggaataattaagccggtacgttcggccaacggaataaattccgcgggcgagcgcgctggcgtcgtgctgttttgccagcgggcgaggtaaatacctcctggtgtgggtccgcagccagcggcttaacatcgccatatctggcaatcatttggttctgcacccagagtgccagcccgttgtcatcggtatcgctatatagcgcatcgcgcagatggatgtcgctgatcgtgacaatcaccctgatcggcgctaagcgcgtctgatagatcagcaccggccgcttattgaccatcattctggccgggagcagtaacagagggtcatcaggcaaagactcagggctaagtgtcaggacccggttgccagttaatgacgaacacgccagcaagaaataccatcagcgccagggaaaaggcaatcactcgcagccggtggatgaagagacggcgttgtttcttggcgatcgcaccgtcagccaggccgcgtggcagcccggcgcgatggtgcgactgacggtcagcggcaaggcgcgggtatttagcggctaatccctgagcaggcggcgccggctatcgccggtgccgcacagaaagctaatcaggcggaggatgaagccgatagtatccgcgccactgacctcgtcgccatggagtggtagtacgttggaacaattccgcggggtcagtccatctcaccgccgttttgccggtgtgcgctttacaaatccagcactaaccggccgcctttggcgcgcgagcagcagatcagcatactctgctggctggctttctcttcctcgctgtaatactgatcgcggtggtcggcttccccctccagaatcatcgtttcgcaggtgccgcacaccccttctcggcacaggcattcgaccttcgccgctttgttattctcgatcacctgcaaaatggtcatatcctgcggcacggtaaattcgcgtccggaacgcgccagcaccagggtaaatgcctctccgcttttatcctcaaggataaactgctcaaagtgcagctggctggcgggcacctgatggcgttcggcggcggctttcaccgcctcgttaagcgccgctgggccgcaggtatacacgtgggttcctggctcgaggtcggcgaacaggcgcggtaggtcgagacggctgccgagcgctgatacatgaacattgacccgatcgcgccacggcgctgcgctgagcgcatcggcgaaagcattactgtcggcgtcgtgaaaacagtaatgcagctgccagtcggcctgccgctgttccagttccggaatatgcgataagaatggcgtaatgccgatgccgccggcgatcagcagatgttttcgcgcctgtggttcgatggcgaacagattgttgggcgtggacaccgtcagggtatcgcccgggcgcacccgctggtgcataaaacgcgagccgcctttggaaggcgactcaagacgcaccgcaatctgccagctggtggtatccagcggcgagctcattagcgaataggcgttactgtagcgctgctcgccatcctgcatctggacgataatatggctgccgccgctgaatgccggcagcggggcgccggtcggcgacaccagcgtaaaacgcttcacaagaggggtgatctgttcaacatcgcgaacgaccgcctcaaacatttgataatcagacatcgctgaactccatcaaaaaatcccggcgtggctagcgccatcgccgggagagcacatttacaacccctggcagagatacttcatctccaggtaatcttcgattccgtgttccgacccttcgcggccaagaccggactgctttaccccgccaaacggtgcgacttcgttggaaatcagcccggtattgataccgaccatgccgtattccagctgctcggagacgcgccagatacgggcggcatcgttgctgtaaaaataggaggcgaggccgtagatggtgttattcgcctgctcgatgacctgctgctcatcgtcaaatttcaccaaagcggccaccgggccgaaaatctcttcctgcagcagcaatgaccccggctgtacgtcgccgatcaccgtaggggtgaagaaattaccgcccagcggatgcgctttaccgccagttaacagcgtggcgccgcggctcagggcgtcgtcgagcagggactgcactttgcgcccggcgtcggcgttgatcagcgggccaatctgtacatcggactcgctgccatcgcccactttcagggcggcgacgcgagcgacgaatttatcgcagaattggtcgtagatggcgcgatgaatatagaagcggttgacgcagacgcaggtttgtccggcgttgcggaacttggcgatcagcgcgccctcgaccgctttatcgatatcggcgtcgtcaaagacgataaacggcgcgttaccgccgagctctaaggagagctttttgatggattccgcgcactggcgcatcagcacgcggccaacttcggtcgaaccggtaaaggagagcttacgcacccgctcatcgccggtgaacaccgcgccaatttctcgcgactggccggtaacgacgttaatgacgccctgcgggatcccggcctgattcgccagctccgccatcgccagcgcggtaaacggcgtttcgttagccggcttaatcaccatcgtacaacccgcggccagcgccgggccggccttccgggtgatcatcgccgccgggaagttccacggggtgatcgccgcgcagacgcctaccccctggcggatcaccatcaggcgtttatcggcgccgggggaggggattatctcgccgttggcgcgtttcccttgttcggcaaaccactcgataaacgaggcggcataggcgatttcgccttccgcttccgccagcggcttgccctgctcggcggtcatgatctgcgccagcgcggtcttgttttcgaggatcaggcggtgccagtttttcaatagcgcggcgcgctgggcggcggtgaacgcgcgccagttcggcagcgcggccgcggcggcatccactgcctgttgcgcttccgcacgccccatattggggatctggccgagcgtcgcgccggtggaaggattgctgacggcaagcgtcgtgccgtcggcggcgtcgcgccagcttccggcaatcagcgcctgctggcgaaacagatctgagtgaaacacagacatagcaagctccttcaacgattacggctggaacacctgggcgaccagattgtggaaatgcgcgatcccgtgctcggagataccgctgccgctgttatccgccataatgcgcccctggccgcgatagccgcgggacttcagccccttctgcacgctttccaccaggcgtaaatcttccgggcggaacacgtcgcgataccactcaatcagcgctttctgatcgtcagtcagctcttcgttggtgaaatagatgtcgtaattctgcagagtggtctcttcatccaccgggaattcatagataacggtcatcatgcccttgatcggcgtgacgttgaacatggtgcacggccacagccagaaaccgtgaaacgcggcgtcggtaccctcttcgaatttaaacgactgctcggacggtttggcgaagccatactgcagcgtccatttgccgtgcatggtgtgccagtagcggtcaacctggacggaatccgagaagcccgggtgcgccggaccgcagtggtaacattccagatagttatcgacgatatttttccagttcgccggggtgagggtggtaaagcgcgccgccagtttcagatcatgcacgtccggacaggcttccagcactttgtcctgcagccccggtagctgcgtttccacactctccgcttccggattcatattgataaacacaaagccggcatactcttccaggcgaaccggcactagcgttgccttttcgctatcgaaattcgccacgttttcgcagttgcgggcgtgggcgagattgccgtccagcttgaaggcccaggcgtgataggggcaggtaatcacgtttttggctttgccctcgccgctcagtagctggtggccgcggtgtgggcagacgttatagaaggcgcgcagaatgttgtcgcggccgcggactataacgatattttcgccgatgatctcccgggtaatgtaatcgttcggccgggcgacctcgctgccgtgggcgacgcaaatccagctattggcgaagatgcgctctttctcgtgctcaaacgcctggctgtcggtataaaaacgggccggaatggtccaggcatcctgcggattagcgcaaaagttaatcggcagggtgaagtcagggctcaaattgctcatgtagggtctccttgtgattattgtcagtaagaggttttacagcgactggccgtcgcctttgagtaccgcgccaaccggcagcgtctcggctttaataatgggctcgggggtatgggtttctatctgatggaccggaacgtgggcgtagtcctgttttaaccagcgcacgaagccgccggttttaatcagtaaaatggccaggaacggtagggcggtcagcaccacggtagttttcatggtctcaagcgaagcgccggtaaacagaatcgacagcgggatgagggtgatcaccacgcaccagaacaggcgcatgccgcgatccggatcgtcgccttcgcgcaggttgcgggtactggtcgccgccatggtgtaggccaccgcatccatgtgcgaggcgaggaaaacaatcatcacgaacagataggcggcgaggaacagcttacctgccggcagcgacatcaggacctgctggacggcggtttcgccgccgagagtctgcatcacctgtggtacgttaatcacgccgttaacgaactggtgcatggcgtagctttccatcaccccgaagaaaaaccagcagccggcggtgctaccgaggagcagtccccagatcacctctttgattttgcgcccgcgggagacgcgggtgacgaacatcgccacgcctggggtgtaggagatccaccacagccagtagaagacggtccagttgcgggtaaaggcgccgtcgccgagcgggtcggtaaacaggctcatctgcaggaagttttgggtcgtcaggccgacggcgttaatgatgttattggtgatgaattcggtcgggccaaccagtaataccaccaacggcagcagaaacgccccccagccgaccattttgctcaggcgctgcaggccgttgttgatgccaatccacgaactcatgcagaaaataccgccggagagcaggatcacaaatgcctgcatggtgaagttatccggcagtccggtcagcgctgacaggccgcgggtgaaggtggcggcggtgactaccagcgaaatggttaacgcgccgacggtagcgatcaggaacatcagatcgaccagacggccccagaaaccttgcggattaacgccggtgatcgccgaaacgatcccggagaggctgaggcctttatttttccgcacgtggaagtgataggccatgatcagcgaggcgagggtataggttgcccaggcgcttacgccccagtggaagaaagagtaagggatgctgtattccagcgctttcggcgattgcggggcaatgttaaggcccggggtctggtagtaataagcccattcggcaacgccccagtacagcgtggaggagccgagaccggcgcagataaacataaacagccatgagagggtactgtattcgactttaccttcgccgagacggatattgccgtatttgctggtggccagatacaacaccagtcccagcgccagcagcaccagtacctgtaccgtggaacccagcaggcgggtcacgccgttaaaaatcgaatcagccgcctgcgcggtttgctgggggaagagacttaatgtagcggcgatgaaaacaatggccgccaggctgatggcaatcagcggcacatcttttttctttacgttgctcaacatgagtgatctcctgggcatgattgcccgtcggtggctttagcctgtcgttgttatcacgctgtagggtcagggttcgtagcaagatgctattaacaattggattatttcttcgttacatgaattaaacaattggccgtttcgtgaagcaataaaacacgaaacggaaataataaaaggtgaattggcgcaggttctgtcctttcaggaattaataaagttcaccgctgtgatgcggttcacttgtcaatcgtgggggattctgcatagcgaaaagagaggggcgttggcggaccaggcgcgcgggttttcccgggtagcggctgcgccttacccgggctacttgctgtgccgttttttgccgggtagcggctgcgccttacccgggctacttgctgtgccgttttttttgccgggtggcggctgtgccttacccggcctacacactacattatcgtgcgattgtagccccggtaagcgcagcgccaccggggagcggcggggtaattacgccaaaatggccttgcagatagcctcgctaacctgctgcgttgaggcactgcctttcatgtccggagttttcggtccgcaggcgatcgtctgctcaatcgccgccagaatgccatcgtgagcggtgtggtagcgctcatcgccgttgccgaggaaatcgagcatcatcgccccggcccaaacggtggcgatcgggttggcgatatttttaccgtaaatatccggcgccgacccgtgaaccggttcgaacagcgacgggaaattgcgctccggattgagattggccgacggcgcaatgccgatagtgccggtacaggccgggccgagatcggagagaatatcgccgaacaggttggagccgaccaccacgtcaaaacgctccggctgcagcacgaagcgggcacacaggatatcgatatgctgcttgtcccagcgaatttcgggatagtttttggccatctcttccacccgctcatcccagtagggcatgctgatcgccagaccgttggatttggttgcggaggtcagcgttttgcgtgggcggcttttcgccagttcgaaggcgtagcgcaggatccggtccacgccgcggcgggtaaagaccgactcctgaatcaccacttcatgctcggtgccttcattggcgcggccgccaagggcggaatattcgccttcggtattttcgcgcaccacgtaaaaatcaatatcgccggcctttttacccgccagcgggcaggggacgccggggaacaggcgcaccgggcgcaggttgacgtattgatcgaactcgcggcggaacttcagcagcgacccccacagcgaaatgtggtcgggaacggtatccggccagccgacggcgccgaagtagatagcatcgaagccctgcagctgctcgcgccagtcgtccggcatcatcttgccataatgggcgtaatattcgcagcttgcccactccatctgctcgaagctcagcgacagatcccaacgctgtgcggcggcttgcagcacgcgaatcccttcaggcagaacttctttgccaattccgtcacccgggatggcggcaatacgacaggtttttttcattccggttctcactttttaacgatgatgtttgaccacctgcctatcctataattgactggttcataattaatcacgctaactggtgaaacataaaacacagatcatgaataatctgccgctgctaaatgatttacgcgtctttatgctggtcgctcgccgggccgggttcgccgccgccgccgaggagcttggcgtatcgccggcgttcgtcagcaagcgggtttcgctgctggagcaaaccctgaatgtgatgttgctgcaccggaccacccgtcgggtcaccattaccgaagagggggagcggatctatgaatgggcgcagcgcattttgcaggatgtcgatgagatgatggatgagctttccgacgtgcgccaggtgccgcagggaacgctgcgtattatcagtagcttcggctttggccgtcgggttgtcgccccggcgctgtcggcgctggctctccagtacccgcagctggagctgcgtttcgatgtccaggaccggctggtggatttagtcaatgaaggggtggatctcgatattcgcgtcggcgacgatatcgcaccgaatctgattgcccgccagctggcggccaatcaccgcgtactctgcgcctcgccgcagttccttgcccgccatgcgccgccgaaacagctgagcgatctggccgcgttaccctgcctggtgattaaagagcgcgatcatccgttcggcgtctggcaattgcatagcaaagagggccagcacgccatcaaggtaaccgggccgctctcctccaaccatggtgaaattgtgcatcagtggtgtctggacgggcaggggattgcgctccgttcgtggtgggacgtccgggagaatatcgccagcggacatctggtgcaggtgctgccggactactggcagccggccaacgtctgggcggtttacgtctcccggctggcgacgtcggccaaaatccgcaccaccgtggagtttctgcgccactactttcagctgcactatccgcagcatgagccgacggccagcgccgtcggcagaggcgattaaaccccaaggcggtcgcgcaggctgtagtaggcggcgcccatggcggtaaaaggaatgcgcaggctgcggccgcccgggaacgggtagtgcggcagtttggcgaaggcgtcgaaacgctcggcgtcgccgcgcagcagctctgaaatcaagcgtccggcaaggtgggtacaggtcacgccgtggccgctgtagccctgcatgtagtaaatattgttatcgagacgcccgaactgcggcatccgcgacagggttagcaggaagttgcccgtccagcggtagtcaatcttcaccccctgcagctgcgggaaggttttcagcagtttcggcataatcagccgctccatgtcgtccggatcgcgcgcgccgtagaccacgccgccgccgtacagcagacggttgtcgccggtcagacggtagtagtccagcaggtagttacagtcttccacacagtagtttttcgggatcagcgagcgggcgacctcttccgacagcggagcggtagtgaccacctgggtgccgcacggcatgctgcgtttcgccagctccggctccagtttatcgccgagataggcgttgccggcgacgatcacgtagcgcgcggtgacctggccgcgcgcggtgctgaccaccgccgggctggtgtgctggatgcgggtgaccggcgactgctcatacacccggccgccgttcaggcgaatggcatccgcttcgccgatggcaaggttcagcgggtgaatatggccgccgctgtggtcgagcagggcgccgacgtagcggtcgctgtccacttcgcgacgaatggcctctctgtccagcagctccagctgggtgttgccgtagcgctcccagttggctttctgctcttccagggtttccagctgtttatggttcatcgccacgaacaggccgcccgggcggtaatcgcactggatctgataccgctggatgcgttcgcggatgatatcgccgccttcgaacatcatgctgccgagcatttttgccgcatccgggccgtagttcttttcaatgacgtcgatatcgcggctataggagttgaccagctgaccgccgttgcggccgctggcgccgaagccgatgcgcgccccttccagcaccaccacgtcgtagcccatttcggccagatgcagggcagacgagaggccggtgtagccgccgccgacgacgcagacgtcacagttgatggatccctccagcgtcgggaacggttcatacttgttggcgctggcggcatagtagctagtggtatgttcagtcatgatcaagactccagggcaatccagatggttttcagttcggtgaatttttccagcgcgtgcagcgatttatcgcgcccgttgccgctctgcttgtagccgccgaacggaacggtcatatcaccatcgttatagttgttgacgaagaccgagccggccttcaggcggcggctcatgcggtgggcgcgggagagatcgcgggtccacaccgcggcgcccaagccgtagtcgctgtcattggcgagctttagcgcctcttcttcgcttttgaagcgggtcaccaccagcaccgggccgaagatctcttcccggctgagggttgatgccgggtcgacgtcaacgaaaatggtcgggccaacggcggcaggccacgggtttttccgtccgtcgaggaacagggtgctttggctttcgccgccgcgaataaagctatgcacgttgtcggcatgggtattgtcaatcagcatgcccatggtggtgtccggatcgagcgggttgcccggctgccagtgttgcgcctcagctttcagccgcgccaggaactcgtcagcgatgctctcctcgagcagcagacgggtcccggcgatgcacacctgtccctggttgtagaagatgccgccggcggtggcgcgaaccgcttgttgcagatccgggcaatcggcgaagacaatgttggcgctcttgccgcccgcttccagccacacgcgcttcatattgctgtcgccggcgtctttcagcagctgcttgccggtgcgggtggagccggtgaaggtgatgacttcaacatcaggatgcagggccagcgcctgcccggcctcgtggccaaagccgctgaccacgttcaacacgccgtccggcaggccggcctctttcgccagcccggccagacgcagggcggtaagcgacgatttttccgagggtttgaggattacgctattgcctgccgccagcgccgggccgagtttccagcaggccagcagcagcgggaagttccacggcaccaccgcggcgatcacgccaattggttcgcgaacgatcatcgccagctcgttgctgccggtgggggccacttcgccatagactttatccagcgcttcggcataccagcgaatggcgcgggcggcgccgggaatatcgtcgcgcaggctgtggcgaatcggcttgccggtatccagcgtttccagcagcgccagctcttcacgatgggcctccatcagattagcaaagcgagtgaggatcgctttacgctgtgcgggggaggcctgcgaccagtcgccgttatcaaaagcctggcgcgcggctttcaccgcccgttcgacgtcggcttttttaccgcgggcgacctgggctaatgtctgctgcgcggcggggtcgatagtctcaaaggtggtattatcggccgcggcgcaatattcgccgttaataaataagcgcgtttcaatggccaggtttttcgctttttcctgccagtaagccaggtgctgaaaattcatcatgactccttaaaaacattatcggcaaattaatcagtgcggcgttttcaggctgcacgggggcactgcgccgggcgcagggcatagcgtatccccggagttgaataccgttttattctcctgatttttgacgggttgtttgcaacccgaattattcaggagcgagtcgccattcactggcgttaattatttcagggccaacaggaaataatattccgtacggcgcagacgttattactacgagttcttcgccgcgacgaaaatagattttccgtcgcgacaggcctgaagtaagcctgaacttcgttcaggcgaaataatcagaatgtggtgggggtgtgggcactgatgatgcggcagatgcctgccgaggtgttgctgaagctgtgcggaatgccggtattaatggcatagctctgtccagccaccaggtggtacgactgaccgttaatggtcagcacgatctcaccttccagtatggtgcctatctcctcaccctgatgcttaatcctctccccggtcgtggttccaggctggtaagtttcaaaaatcatcgccagcgtacggttcggatttccgttatgaaccagcttcatggaaacgccctgacttcccatctcaatcaggtcatcctgattaatgaccacctggggttcgtccggcttttcgggttcagaaaagaattccgagagcgacagcccatagactttcagcagcttttgcagcgtactgatggcaggactgactttatcctgctctatggtgctgatggcactatgtgttaacccagacagttcggcggcacgacgctgtgagagacccagctgttggcggatctctgacagacgtttccctggcgccagtccgtcatcgctcatatttgcatttccttaacggtagtggtcagcgccgccgcttttcagcatgatggccctgacaggcggtgataaaaccatcaaacaacatacgcgacagggcgtattcgctactgttccattctggatgccactgtacgcccagcgcgaaaggatgatcgttcacgctgaccgcttccaccagtccatccggcgctcgcgcctccactcgcagctgcggactgagggtttttgccccttgcccatgtagcgagtttacccaaaacgtgttgcagcccggtatcaattgcgacagcaatcctccttcctgaacctcaacctgatgggacggcgcatactgctgctcgacgggcagttcaggatcttcgcgatgttcaaggagctcaggctgctcgaacagacgacgatacagagtcccgccggtggcgacaaccagttcctgcagtccacgacagatggcgaaaatggggatgcgcctttcgagcgcggcgttaatcagcgccatgctcagaagatcacgcccggggtcggcgtcaggctcatcgccgttttcaccataaaggtgcggctgcacgttgctggggctgcctggcaggtagatcccgtccagtttatcaacgaccacgttcagtagctccggctccgccagcgcatgcggcagggcaatcggcagtccgccggcgttaacaattgcattcaggtacttttcttgcaaggtctgggtctggtgacccttaagcctgtttctacacatcacgacgccaataactggcttgtacattatattttccatgatcgccctcacaaagtggactaaattatgaccgctatagcgggtttaacggccatatcgttcaatattttctcaatctagcagtggaaatagccctttgcaaacttaatttaacatttgacaaacaatttatttgcatacacagtcgatggggtggacattatatttaacggtctgagtgcaggaccgaaacccaaccaacggcggtgaatcatggaaaccaatatcgtagaagttgagaattttgttcagcaaacggaagagagacgggttagcgcgttcgcgaaagaagtgaagcgctacctcgaaacctaccctgatacccagtatgtcgatgtcctcctcactgacctgaacggctgcttccgcggcaagcgcatcccggttgccggcctgagcaaactggagaaaggctgttatttcccggcctcggtgtttgcgatggatattctcggcaatgtggtggaagaggccggtctgggccaggagatgggcgagccggatcgcagctgcatcccggtacccggcaccttaaccccttcggcggctgacccacaatcgatagcccaggtacagctaaccatggttgatgaagatggcgctccctttgacgttgagccgcggaacgtactcaaccgcctctggcagcagttgcgccagcgcgggctgttccccgtggtagcggtagagctggagttctatttactggaccgcaaacgcgatgccgaaggctacctgcagccgccgtgtgcgccgggcaccgacgatcgcaacacccaaagccaggtctattcggtcgataaccttaaccacttcgctgacgtgctcaacgacatcgacgagctggccaaactgcagctgatccccgccgatggcgcggtggcggaagcctcgccgggccagtttgaaatcaaccttcaccataccgataacgtgctggacgcctgcgatgatgcgctggcgttaaaacgtctcgtgcgtttgatggcggagaagcataagatgcacgccacttttatggcgaagccttatgaagagcatgccggcagtgggatgcatatccacatcagcatgctgaacaataaaggggaaaacgtgctggtggacggcgatggggaagactctgcgctgctcaaacgcgcgctggccgggatgatcgatctgatgccggcctcgatggcgctgctggcgccgaacgtgaactcgtatcgccgcttccagccggggatgtacgtcccgacgcaggcttcgtgggggcataacaaccgcaccgtcgcgctgcgtattccgtgcggcgagcggcagaaccaccgcgtggagtatcgcgtcgcgggggcggacgccaacccgtatctggtgatggcggcgatttttgccggcattctgcacgggctggataacccccagctgcctttacaggaagaggtggaaggtaacggtctggaacaagagggcctgccgttcccgatccgccagagcgatgcgctgtgggagtttatgcagaacgatcacttgcgtgagcgcctcggcgagcgtttctgccatgttttccatgcctgtaagcatgatgaattactgcagtttgagcgtcttatcacagaaaccgaaattgagtggatgttgaaaaacgcctgatggtcgccccgcgaggggcccataagtttggtaatcagtagcatcatacggcctgagcggagcctggccgacgtttttgctgggagcccagccatttcccggatgtcgcgttaaggagcgcaggcggcaacggggcttcagttaacgacacagtgtgtgacgaggaaatgagatgatgcagatgttcaaatatccgcagggagagggaggccgctcaggccgcattggatgccagccagctaccgcttaccggtccgtcttacccttttatctatgccttacccctttgctaagcaggtttgtcacgcggacgttgggcccgcaaactgttaacagcaagaggggtatgggcgatggctattaatcctccggcacataacgccgctcaggcgggcagaccgcgtctgcgtaaatccctcaaactctggcaagtggtgatgatggggctggcctatctgacgccaatgacggtgtttgataccttcggcatcgtctcgggcatcagcaatggccacgttccggcgtcttatctgctggcgctggctggcgtgctgttcaccgccatcagctacggcaaactggtgcgtcagtttccggaggccggttccgcctatacctacgcgcaaaaatccatcagtccgcacgtcggctttatggtcggttggtcgtcgctgctggattatctgtttctgccgatgatcaacgtcctgctggcgaagatctatctctcggccttgttccccgaagtgccgccgtgggtgtgggtagtgacctttgtctctattctgaccgccgcgaacctgaaaagcgttaacctggtggccaacttcaataccctgttcgtgctggtgcagatttcgatcatggtggtgtttgtcattctggtggtgcaggggctgcataaaggcgagggggtgggtaccgtctggtcgctgcagccgtttatcagccagaatgcgcatctgatcccgattattaccggcgcgaccattgtctgcttctcgtttctcggcttcgacgcggtgaccaccctgtcggaagagacccctgacgccgcgcgagtgatcccgaaggcaatttttctcaccgcgatgtacggcggcattatctttatcgtcgcgtcgttctttatgcagctgttcttcccggatattcatcgctttaaagaccccgatgccgcgctgccggagattgcgctgtacgtgggcggcaagctgttccagtcgattttcctgtgcaccacctttgttaacaccctggcgtccggcctggcctcccatgccagcgtctcccgtctgctgtacgtgatgggccgcgacaacgtcttcccggagcgcatttttggctatgtgcatccgaaatggcgtaccccggcgctgaacgtgattatggtgggcatcgttgcactgtcggcgctgttcttcgacctggtgaccgccaccgcgttgattaatttcggcgcgctggtggccttcaccttcgttaacctgtcggtgttcaaccacttctggcggcgcaaggggtacaacaaaacctggaaggatcgactgcattatctgctgctgccgatggtcggggcgttgacggtcggggtattgtggatcaatctcgaggccacctccctgacgctcggcctggtgtgggcggcgcttggtctgctgtacctgacttatctgacccgacgcttccgcaaaccgccgccgcagtttgatgccgctaaagcggagcaggcctgggagtcataggttctgaggcataaactgaacgaaggcaggcccgcaggcctgccttcgtgttggcttcggtaagggacagtacaggacggtaaagaaatcagcagaaaacggtggggaacggaaggtattatttcttctttttatggacaggtaactgactggcgcgccgctctttgaggtacgacaccaggctgtagatggcgacgcccagcagcgccaccgcgacgataaagagaataagacccgacatagaccaacctaatattctgtttggaaagggaaaaagatacagggctctgtgtgaagataacatcgggatatgtctgaaagatgacgcctcatcgcgagaatatccggcggcggggttgtgataaaatatttcccgcagggatgtgaccgcctgggtttcacctgaaatggcgtaacactccgttaagtgattttacagaagtgcggcctatagcgagttacgctgaccgcgaataagaacgatctgagagtcagtcatgtataagaaaaccctcagcctgctgggcgtagcgttggcgctgtctgccttcgccagtcaggctgaaagtgaacgtcaggcgagccgcgagcggatcgtggagcaggtcctcaagccgtgtgaaggcaaaaaggcgggcgataaggtggtgattaccgatcgccgcggcggcgagcacgaggcgatctgtaccctgacggcggttccgctaccggagtagcgcccgccgcacggtgccgcttatcgataccgcggcgcaggctgtccggttcgcgcactggtaaacagcgccagtctggactgctcaaaagtctcccacagtcccaggtcatgaaccggtggtaaggtgacctgttcccccatctccagccccctgagagcggcgtcaaccagatcctcggtggtcattaccgtgccgctgggcagagcgtccagcgccacgccggaggtcggccacagatcggtagcggtcgccgccggcaataccgcctgaatacgcacgccgctgtcggcaaactcctcctgcaggccgcgggtgaagctcaacacccaggctttgctggcgctgtagactgcgctgcccggcagcgtatgcagcgcgaggatagaggcaatattgatcagcgtcccccggcgtcgtggggtgaaagcggccagcgcggcatagctcagacgcagcagcgcggtggtgttgagcgtatgaatcgcctggtgctcgcgtggcgtactggcgagaaaacccgccaatttcgcggtgccggcgttgttaatgaacaggtcgatggcgggatcctgctgcagacgctgctctacggcggcaatcccgtgctcttcgctaagatcggctttgaggatgcttgcctggatggcgtagcgcgcctgcagctggtcggcgagcgcctgcagacggtcttcacgacgggcggcgaggatcaggttgtagccgcgggcggcgagtcgttcggcatagatcgcgccgatacctgaggacgcgccggtgataaaagctgtgtgcgatggttgggtcatgagaaatgcctcgtaaaaggttgcattattaaaccaaattcagcatgagatattaggtttaataatgcaaccattttgccaggactttttcatttttgcttgtcgcgggcagcgtttagttgttcagcgggatagcgatggtgatgtccgccggggccagctcacggccatctgccgcctgcaggaccagcttacgcaggggctggcgctgctggcggtcaatgagccgggtcgccggttcgtcaggatcgaacagatagtcgtctgcccactgggagagggcgaccagcaccgtctgcagggcacggcccttatcggtcaggacatactcctgccaggcgctgccgtcggaggccggctgcaggcgcaggatgccttcatccaccagcattttcagccgcccggcgagcatgtttttggcgataccgaggtttttctggaattcgctaaaacggcgcaccccgcgcagagcatcgcggacgatcagcagcgaccaccagtcgccgataacgtcgagggagcgggcgatagggcaacagctgttttccagacgggtacgtttcacgaaagcctccaggttaattgtttcattataaaactctttgcctggcaggggaaattttcggctacggtctaagtttgcgagcgattaccaggaaaaatgtcataaatccggcacaattaacgcgatgataataaatgactaaggatgaagggatgaaaaaacgtctacttgccgccgccgttgccggcgcggtgatgttatccgctggcgctcaggcgcaggacacggccgccccggaggggtatcagctgcagcaggtgctgatcatgagtcgtcacaacctgcgtgcgccgttggccaataacggcagcgtgctggagcagtccaccgccaaggcctggccgcagtgggatgtgccgggcggccagctgaccaccaaaggcggtgtgctggaggtgtatatgggccactatatgcgcgaatggctggcgcagcagaagctggtgaccagcggcgagtgcccgccggaaaacgcggtttatgcctacgctaacagcctgcagcgcaccgtcgccaccgcgcagttctttatcaccggcgcgttcccgggctgcggcatcccggtgcatcaccagcctcagatgggcaccatggacccgaccttcaacccggttattaccgacgactccccggcgtttcgcgagaaagcgctgcaggcgatggaaaaagagcgccagggaatgcagttgaccgagagctacaagctgctggagacgatgatcgattaccgcaactcaccctcctgcaaagagaagaaggtctgttccctgagcgagggtaaagatacctttagcgccggttatcagcaggagccgggagtgtccggaccgttgaaggtgggcaactcgctggtagacgccttcaccctgcaatattatgaaggcttcccgaaagatcaggtggcgtggggggagatcgccagcgataagcagtggcaagtgctgtcgaagctgaaaaatggctatcaggatagtctgtttacctcggtggcggtggcgcaaaacgtcgccaaaccgctggttaaatatatcgataacgcgctggtgggcgagggagccagcaaggcgaaagtcacgctgctggtgggacacgactcgaatatcgcttcgctgctcaccgccctggactttaagccctatcaactgcccggccagtatgagcgcactcctatcggcggcaaactgctgtttcagcgctggcatgacagcgccggcaatcgcgatctgatgaagattgagtatgtctatcaaagtaccgagcaactgcgtaacgccgacgcgttaaccctgcaggccccgccgcagcggatcactctggcgcttaacggctgtccggttgatgaccagggattctgcccgctggagacctttaaaaaggtgatcaacgaggcggcgaaataacgaaaaaaacccggagcactccgggtttttttagcaggttagggtgagcccaggtggggataaacctcctagacgtttttacgctcaatcgtctgttcgccccagaacaggctgtctttatcggttttggcaaaggccagcgccagcacttcgtcgctgccttcctcccagatttgctccgccagtttttcatcgtagtgggcgacttcgaaaatcgcctcggcaatttccggcgaggtgttacgtaaacttgcccattcgccgacgcgatgtgcttttgcttcttgagttggcatagtgctcctcctgcagaagattagccgtgcagtttaacggccagtttggcgacatgttcaccctgatagcgggcgatggctaactcttcctcgctcggctgccgcgagccgtcgccgccggcgatggtggttgcgccataaggggtaccgccgcgtacctgggaaatatcgaatagctcctgggcgccatagccgatcgggacgatgatcatgccgtggtgggccagcgtcgtccaggtcgaggtaatggtttgttcctggccgccgccggtaccggttgagctaaatacgctggcgattttgccatacagagcgccggacgcccacagaccgccggtttgatcgaggaaagtacgcatctgaccggacatgttgccgaagcgcgtcggggtaccaaagatgatggcgtcatactctgccagctcctgcggcgtggcgacgggcgcgttttgcgttttcccgcctgctttggcgaatgcttcagcctgcatggtttccggcacgcgcttcacaaccacctcaacgccgtccacccggttcgccccatcggcgacggcgtgagccatggtttcaatgtgtccatacatggaataataaagcaccagaattttagccatttccatcactcctcggttgcattataagccagcaaaatagctggtacctttaaagataaagcctccgccggagagtgcaaatccaacgggcatttgtttgatttataacaaaatgacaaagcgttatttacttttccttgcaccgcgcggcctgaaagggaattgaaggaggaagcgttgcgtctgctattttggccgctgcggcgaggatgtagcatcaggatacatttttgctgactattttttcttcgccagcagagtcggttaggagctgttggcggcgcgaggaagcttttttcgcccggctttgtttctggatgttacattcgccgccgtcagccgcagtcattcactaaccttatagatacgcggcaggacagcggcgttgccgctcccgcgtaatgcactatgatgtctaacctaatggaggtcagtaatggcaaaccatcgtggcggttccggcaactttgctgaagaccgtgaaagagcatcagaagcaggacgtaaaggtggccagcatagcggggggaattttaaaaatgaccctcagcgcgcctcagaggctggcaaaaaagggggtaaaaacagtcatggtagtcgtgaaagttaacgcgcgactcgcactgttctctttgatgcggtgttaatctccccgacccaaccgcatcgccctcgccgccggcatctgccggcggttttttatctgtcggtggttgcgctcccgccgggcggattgcacactggtcgcccgttaatcgtcatggctgtcttatgtcttcgttaaaattctccgttagccgccaggaagcgctccttatcatgatcaccatgttctggggagggacgttccttgccgtacagtacgcggtgagccttagcgggccgctgttttttgtcggtttgcgttttgcgaccgccgcgctggcggtgggcctgctttcgctgcgcactctgcgcggtctgacgtggctggaagtgaaggccggggtagcgattggcgtggcgattgcgctggggtatggcctgcagacctggggactacagaccatctccagcagtaaatctgcctttatcaccgcgatgtatgtaccgctggtgccgctgctgcagtggctgtgtctgggacgtatgccgggggtgatgtcctgcgtggggattgtgctggcctttattggtttaattctgctggccgggccggaaaataatctgctggcgcttggcgtgggggagatgatcactctggcaagcgcggtggcgatcgcggcggagattatccttatcagcgcctgggccggaaaagtcgatgtccgccgggtgacggtggtgcagctggcgaccgcgtcgctggtggctttcgccgccatgaagccggcgggtgaatcggtgccgtcgttgacgccggccctgctcggcgtcgcgctggggctggggattttcagcgcgatcattcaggtgaccatgaactgggcgcagcgcagcgtctcgccgacgcgggccacccttatttataccggtgaaccggtatgggccggtatttttggccggctggccggtgagcgtctgccgctgctggccctgctcggctgcgttttgatcctcgcgggagtgctggtgagcgagctgaagtggaagcgcaagtcgccgccgcaggtttccacaaacgacgatgcgcagccgctcgctgacctggccgatcgccgcgagccataatattttccttctgacccgacagcggcgcttatcctggctggtactcgtccggctctgattgtctccaggcccgtgccagcgcagcgccgccgggcgatggcatcaggcacggcgtcgcttttatgccgggtggcggctgcgccttacccggcctacgttcgtacgacctgccgttaatttattcaccattgttgctgaaactgccggtgctgacggcctcaaaatcgctgagacattcccggaaggccgtggcagtctccaggcccgcgcaagcgcagcgccgccgggcggtcaggttccgtgcccgtggtggtgccggatggcggcataaatgccttatccggcctacaggaacacaccacccaggcccacaccgctccctgcgccaacgccgcgctaatgtggcttacaccggcgttaccctggcctccttcgcctcgcgcgtcccgcgatgaagcagcgcgtgcagcaggatcgccccgaaggtggccgtgccaatcccgcccagcgtaaagccgcccagcgacagcgcgaaatcgccggcgcccagcaccagggtcaccgacaccatgatcaaattgctgttttgactcagatccacccggttttgcacccagatccgcgccccggcgacggcaattaagccaaagaccacgatcgaggcgccgccgattaccggcccgggaatggtgtggattaatgcgccgaacttcggcgagaaacccaacagcatggcaatcagcgccgcggcgacaaacaccagcgttgagtagaccttggtcaccgccatgacgccgatgttctccgcataggtggtgaccccgctgccgcccaccgaaccggagagcatggtcgccagcccgtcgccgacgaaggcgcgccccatgtacgggtccatattgcgcccggtcatcccggcgacggccttcaggtgcccgaggttctcggccaccaggatcaccgcgaccggcgcaatcaacatcatcgcctggccgttaaaggatggggtggtaaagtgcggcagcccgaaccacgtcgcctgggcgaggggggagaagtccagcggtttgccaaggcccaggccgttagccagcagggcgtacagcgcgcaggcgacgatcaggccgaccaggatcagcagtcgctgcagcatcccgcgggtaaataccgccactatgccgatgcagagcacggtcaacaccgccatccagctgtcgaaggcgctggcggagacgctgcgcacggcaatcggcgccaggttcaggccgatagccatcaccaccgcgccggtcaccaccggcggcatcaggcgctcgatccagcgggtgccgatcttcatcaccaccagaccaatcagggtgtagaccagcccgcaggcgatgatcccgccaagggcgacgctcagatgagggttcagcccctggccgttaaagccggtaatggcgatcaccaccccgacaaaagcggcgctggagccgagatagctcggcacccgtccgccggtgacgacaaagaacagcagggtgccgacgcccgacatcagaatagacaggttcgggtcgagccccatcaacaacggcatcagcaccgtcgcgccgaacatcgcaacggcgtgctgcacgcccatcaccagcgtttgcccggccgacaagcgttcatcgggggcgacaacgccggattcggcggcaggagaggtcagcttccagcgaggaaaatcgaagagtgccatgatgatatcccgggttaaaggttaacaagctggtcgcataagcgtgtgatagccgcggtcaaaccacatcagtccccggggctccgggtgacgggtaatggccacgacgtgacaaaacagaatgtcgtgcgtcccgacgctgacgcgctggtcgatgcggcagtcaaagctgaccagagccgcctccagccgcggacagcctgtggcgccggtctgccagtcggcggcggcaaaacgctcgtccattgccgttttaccgccaaacagcgtcgacagggtctcctgtccggccgccagggtattgacgcatagcgtgtggtgttcgctgaacaccggccacaccgaagccgagcggttcaggcagaccagcagggtcggcggcgtgtcggtaacgctgcagaccgcgctggcggtgaatcccgcccggcccgccgggccatcggtggtaataatgttaaccgcggcgccgacgtgggccatggcgtcacggaaactcgctttgtccgttaactccatcgtaaactccttatgccagcaggcaggcttcatcaaaggacaggcgcggcaggcggccgtacagcttgccggggtcgccatagccgatgttcaccagcaggttgcttttccagccgttgtcggcaaaaaatgccgcgtcgactttttcccggtcaaaaccggacattggcccggtgtcgaggcccagcgcccggcaggcaaaaatcagatacgccgcctgcagggagctgttgcgaaacgcggtctcttccgccagctgcgggctggaggtaaaccagctgcgggcgtcaccgtggggaaacagggtcggcagccggtcgtagaaggcgctatcccacgccacgatggcggtcaccggcgcctgcatggttttctgcagattgccgctggagagcgtcgggcgaagtttctctttgccttccgcgctgcgcacgaacacgatgcgcgctggcgaacagttggcggaagtcggccccattttcatcaggtcccagacggcctgcagctgcgcatcgctcactggcttatccagccagccgttgtgggtccgggcctgggtaaacagcgtctcgcaggccgtgtggtttattgcgtcgttcatcgggtctccctggtgaccggcagcatagcggacagcccgtcgcgtaaaatggtattaaaggtatcggcgtcggtgacgttacaggcatggccgccccacggcatttccacgagctggctgccggggatcgccgtctgcagcacgcgggagcaggaggcggggaccagcaggtcgtcagcggcgctgataatcagcgtcgggcaggcgatggccgacgcacggcgtgaaaaatcagcctgcttcagggcctgcagccgcttcagcagattctctttgccctgaaaatggctgatggcaagcgcatcttccgcttcgaggcgcggcaggcgcgcggccatccattccgccgggtagagaaatagcggctgcgcttcgacccacgcctgcgcgccgccggcatgcagcagacgctcgcgcacctggaagcagcggcgggtatgcggcgacagcgacagccagccgttgaccagcgccagggcgctcaccgcctcggggcgatcgagcgccagctgcaggccaatcagcgcccccagggcgtggcccaccagcgcgaagcgggcgatccccgccgcctgcagagcgctgaacagctccccggccatcgtcgccaggctgtagccggcgggcagcggaccggcgttctccccggtcccgttatggtcataactcaccagctgatactgttcctccagcgccgcgcgctgcgccagccagtagccgccgcccccgcccagaccggcgctgaggaccaccaccggcgcgccgggccacggagcaggagcaatattgagcctcatcatgtcggggtaccgatatgggcgacgctggcgatttccaccagcgcatcgggcttcaccagtccgcactgaatgcagaagcgcgccggtttatcgccggggaagaactcggcatagacctcgttaatcgcggcgtaatttgtccagtcggtgataaagatgctgttgaaagtcacatccgccatactcccgcccgccgtttcgataacgctcctgatggtctccagcacgtggcgggtttgcgcctttgggtcgccgatgtgcaccacattgttttgcttatcaaacggcagggtgcccgagacgtagaccaccccgtcggcgagcgtccccggaacaaagggggcaatcggcgcggtggtgcctggcggaataatcacctgtttaggcataacgtttctccttggctaaaggcagcggggcggcgggggacagcgcgtggcagaagctctcgacgtcgctgatccagccgaaaaaggtttcaatattgaacagcgccgcctgctgggcgaaggccgggccggcctgatgggtggcatcctccagcacgatgccgaagtattcgagaaagaagccatcgcgcagcgtcgattcgacgcagacgttggtggcgatcccggtgaacaccaggtggcgtatgccgcggctgcgcaaaatgctgtcgagcggggtgttaaagaagccgctgtagcgcggtttcggcaacacgatatcgccttcctgcggcgtcagctcgtccaccagctgataatcccagccgcctttcgccagcagcttgccctgcagctccggacgctgacgcatcgttttcagcgcgttggatttgtgatagttcggcgagcccgggccgccagcttcaacatactgatcatcccagccattctggaaccagataatcaacatacccgcggcgcgagcggcggcgacggcggtattaatattgtcgataaccggccgggtagcggagacgtcaaagccggcgagatccagataaccgccctggctggcgtaggcgttctgcatatcgaccacaatcagcgcgctctgctgcggcgcgaaggtcagggattccgggcgagcgggaagggtaatcatcaggccacctcacgggtaacagaagcaatgtggttccggcagcgcatcagcggctgaatgcgttcgccaaaggcgtcaatgccggcaagaaaatcatcaaaagtcagcagcacgccgtcggtgccgggcacgctcgctacttcatcaagcatacgggcgacgctggcatacgatccgaccagggtgcccatgttaatgttgaccgccgaggtggggtcggccatctggcgcacgttggtatcgctgccggagcgggtatctttctgactctgctcggtgagccacgccagcgcttcttcatcggcgccccctttgtaatgttcccatttggcgcgcgccgcctcgtcggtttcgtcggcgatcaccatgaacagcacataggatcccacgtcgcggccggttttttccgccgcctgcatcatgcgtgcggcggtcggggcaaaggccgttggcgtgttgactcctttgccaaagcaaaagttgtagtccgcatgctgggcggagaaggccatcccggcatcgctctgcccggcgcagatcaccttcatcggctgcgacgggcgcgggctgacccggcagtcgttcatggtgaagtagtcacctttgaaatcgctgcgcccggtgccccacaggtcacggagcacctggacgtattcggtgagatagtcatagcggctggcgaaatagtcatctcccggccacatgcccatctggtcatattccggtttttgccagccggtcaccagattgacgccaaaccggccgccggagatggagtcgatagtggaggccatccgggcgacaatcgccggcggcagcgtcagggtggcggcggtggcgtagatctggatcttcgaggtcaccgcggccaggccggccatcagggtgaaggactccaggttgtgatcccagaattcagttttcccgccgaagccgcgcagtttgatcatggagagcgcgaagtcgaaatggtagtgctcggccttctgcacgatggccttattcagttcaaaggtcggcatatactgcggggcatgggtggagatcagccagccgttgttgccaatgggaacgaaaacaccaattttcatacctacctctctgcagtcatggaagatgggttgcgatggtgcggcatcctgcctctccctggaccacctcgcagaaaaggtaaagcaaaggcgatgccagttttataaatgctaatgttattaatgtgttacttttgagttgctgaaaaggacggtaaaaaagtggactggatggtcaaaatcagtgcacgaaaaaacggcagtcatgcgcaatcagggtgcatggggtcgtgtcggcgcagggcttttgctatgctggtggcgtcaactgaaggagaggatgtatggcacagggcgcggtgaagaaaagcggcaaacgttcacaagcggtcagcgccaaaaaggaggccatcctggccgccgcgctggaggcattttcgcaatttggtattcacggtacgcggctggagcaggtggctgaacgcgccggggtatcgaaaaccaatctgctctattactacccttcgaaagaggcgctgtatgtggcagtcctgcagcagatcctcgccatctggctggcgccgctgaaggcctttcgtgaggatatcagcccgctggtggcgatccgcgaatatattcgcctgaagctggaagtgtcccgcgatcacccccaggcctcgaagctcttctgcctcgagatgctgcagggggcgccgctgctgatgggcgaactgaccggggatctgaaagcgctggtcgatgagaaatcggcgatagtctccggctggatcgaccgcggcaagctggcgccggtcgatccacagcatttaatctttatgatctgggctaccacccagcattacgccgacttcgccacccaggtggaggcggtcaccggcgccacgctgcaggatgcggccttttttgaacaaacggtcgataatgtccagcggatgattatcgaaggcattcgcgtccgttaattggcgggcggcagcgggcagctttgatcgccatcctcgcactgtagcagcgaggcgaggaaagactcccgctccacgctcttatcggtcatgcactggctgaccagcattggctgcatgctgccgccttcggcgccggacgcgagaaaggcgcagtcggcgtcgcgtaaggcgatccatgcctgctgcgcctgcttcagtaatgtttgttgtttacccaccgcccgctgcagggcctgctgccatgtgtcgttcagttttttatcggccgcctgatactgcgcagccgcgcactgattcatttcggtttgggtgttggcgctgctgcactcgtccgccagcgccgcgccgctggccagcagggccatcacggcaaataacgtgcgtttcattgttctgctcccataaaaaaggctcccgtccgggagccttaattaaacacagctgacgtcagctgtcattagctgatcgcagcgcagactgattgcccggatggcggcgcaccgcgccttatccgggctaccctttggcggtggtaggtagccccggtaagcgcagcgccaccggggagcccgttttagccgatggtcatcaggctggcgttaccgcctgccgccgcggtgttaacgctcagcgaacgctcgatatacagccgctccagcagcagattggtttcgccgcgggcgaagccctgcacggagacaatcgccccatcgcgcgccgccacctgctcgcacagctcgcgcagctggtcggaatcgccgtggtagataaccgcgtcgaaggcctggccaggcaactgctccgctttggcaaagcgaatgcgctcgctgacctcccgcggcagtttcttcgccagatcgcgctgcagggcgctgtccggccacagtacttcacaacccaccgccagcacagccgccagctggatcagcgcatcctgttcgttatccgctacgcacagcacgcgctcgcgcggcatcagcgtcagggtgttgcgctcgccggttggccccggcagcaggcgttgagtgccgctttgcgcctgctcgctgtactgctggcacagcgcctgcagctcaggacggcccgcggcccactgctgcagcgcctgcagcggtttttccagcagcgttttcagctgggcgtccagcggacgctctgcatcctggcgggcgaaggtcacgccaaccgcgtcctgcggacggctggagagcagacggtacagatacagcggaccgccggctttcggaccggtaccggacaacccttcgccgccgaacggctgaacgccgaccaccgcgccaaccatattgcggttgacgtacaggttgcccaccttggcgctgccggtgacctgggcgatggtttcgtcgatacgggtatgcacgccgagggtcaggccgtagccagaggcgttaatctgctcgaccagtttgtccagctcgttacggttatagcgcaccacgtgcagtaccgggccgaagacctcttttttcagctcgtcgaagctgtcgagctcgataagcgtcggcggcacgaaggtcccgtgacgccattcgcgggcgtcttcgctattctcacgcaccgcctggtagacggtgcggcctttggcgcgcatcgcctgaatatggcgttcgatattctctttcgcttccgcatcgataaccggaccgatatcggtggtcaggcgccccggattgcccatccggcactcgctcatggcgccgcgcagcatggttaaggtgtgatcggcgacctcttcctgcaggcaaagcacgcgcagggcggagcagcgctggccggcgctgtcgaacgcggaagccagcacgtcgatcactacctgctcggtgagcgccgacgaatcgacgatcatcgcgttcatcccgccggtttcggcgatcagcggcgtcgggcggccctggggatcgaggcggctggcgatattgcgctgcagcagggtggccacttcggtggagccggtgaacatcacgccgcgcacgcgctcatcggaggttagcgcggcgcccacggtctccccgcggcccggcagcagttgaataacgcccggcggcacgccggcttccagcagaatcgccacgccctgggcggcgataagcggcgtctgctcggcaggtttcgccagcacgctgttgccggccgccagcgcggcggcaatctggccggtgaagatcgccagcgggaagttccacgggctgatacagaccaccggacccagcgggcggtgagtttcattatcgaaatcgtcgcgcacctggccggcgtaatagtgcaggaagtcaacggcttcgcgcacttcagcgatggcgttgctgaaggttttacccgcctcgcgcaccaggatccccatcagggtcggcatttggctttccatcagcaccgcggcgcgctcaagaatggcggcgcgctcctgcggcggagtggcgaaccagatcggcgcattgttgatagcgctggtcagcgcctgctgcacttcagcgtcgctggcttcgcggacgtagccgacgatatctttcggctctgccgggttaaccaccggctgcatctcgccttcggccaccggctgctccagcatcggcaatgcctgccatttatgcagcgcgctgttgagcagggaagaggagagggaggccagacggtgctcgttcgccagatcgagaccggcggagttgctccggccgctgccgtagagatcgcgcggcagcgggattttcggatgcggcaggccggcctggccttcctgctgcgccagtttttctaccgcgctgaccgggtcggccaccagctcgtccagcggcagggtattgtccgcgatacggttgacgaaagaggtattggcgccgttctccagcagacgacgcaccagatacgccagcagcgtctcgtgggtgcccaccggggcgtagatgcggcacggccggttcagtttgccgtcggcgaccttgcccaccacctgctcgtacagcggttcgcccatgccgtgcaggcactggaactcatactggcccgggtagtagttctggcccgccagctggtagatagccgccagagtatgagcgttatgggtggcgaactgcgggtaaatcaggttcggcaccgccagcagcttcttcgcgcaggcgaggtaggagacgtcggtgtaaaccttgcgggtgtataccggatagccttcgagaccttccatctgcgcgcgtttaatttcgctatcccagtaggcgcctttcaccagacggatcatcaggcgacggcggctgcgggtggcgaggtcaatcaggtaatcaatgacaaacggacagcgcttctggtaggcctgaatcacgaagccaatcccgttccagccggccagttccggctcgaagcacagtttttccagcaggtcgagggagatctccagacggtctgcctcttcggcgtcaatattgatgccgatgtcatactggcgcgccagcagggtcagcgatttcagccgcgggtaaagctcttccatcacccggtcatactgcgcgcggctgtagcgcgggtgcagcgcggagagcttaatggagatacccggaccttcataaatgccgcggccgttggaggctttgccgatggcatggatcgcctgctgataagaaaccatataggcctgggcgtcagcggcggtcagggcggcttcgccgagcatatcgtaggagtagcggaaccctttttcttccagcttgcgggcgttggccagcgcttcggcgatggtttccccggtgacgaactgctcgcccatcaggcgcatcgccatatccacgcctttgcggatcagcggttcgccgctcttgccgatgatgcggttcagggagcgggagaggctggtctcgttatgggtcgacaccagttttccggtgaacagcagcccccaggtggcggcgttgacgaacagcgacgggctgcggccgatgtgcgactgccagttgccgttgctgattttgtcgcggatcagcgcatcgcgggtggctttatccggaatacgcagcagggcttccgccaggcacatcagcgccaccccttcctgtgaagagagggagaactcctgcagcaggctctgcaccatgccggcgcggccgctggcggttttctggttgcgcagtttttccgccagctgatacgccagcttgtgcgcctgttcgcccagcggctgcggcagacgggcctgctccagcagcatcggtaccgcgtcggtttccggacgtcgccaggcggcggtgatcgccgcgcggctcaccgactgcggcaggatctgctcggcgaattcgaggaacggctgatagggctcttccgttggttcgctggcgtcatcgctttcgttggcggccccggagagcagggccggcagctcaggcagcgtctcgtcgttctccagtttttccagataattaaagatggcctgcttaatcagccagtgcggcgtgcggtcaatacggctcgcggcggatttaatgcgctcgcgggttgcgtcgtcaagcttaacacccatggtggtggtgcccatgctcaaaactcctgtcatttatcgttaggcttatgcggttgcatggaaatatccactatgttgcaactttgtgcaaccttgttaattgtggcttgtgacggaagccgtgaaatggctaatttgttaaaaataacccctaaaatagcagaaatttaaccccgggctcatagggtatttgtatgcgtgagttaacacttttgtttggtgcaacctttaaaaacgtgagagagtgcaacctctaacaaattgacgttttgcgccgtcggtttttcgtgtaaatgctgtgttaaatcgtttgtgaaaaaccgaagcttccgtcaggatacggtcgcccaattaaacaatgcgccattaccccgttccggtagtggaaaaaaacgacgaagttggacgctgtcgataaaaattctggagactttgcatggctattagcacaccgatgctggtgacatttattgtttatatttttggtatggtattgatagggtttattgcctggcgttcgaccaaaaacttcgatgattatattctcgggggaaggagtctggggccatttgtgaccgcgctttccgcaggggcgtcggatatgagcggctggctgctgatgggcctgccaggggcgattttcctctccgggatttccgaaagctggatcgccattggcttaacgctgggggcgtggattaactggaagctggtggccggtcgcctgcgcgtgcataccgaggtgaataataacgccctgacgctgcccgattattttaccggccgttttgaagataaaagccgggtgctgagaattatttcggcgctggttattctgctgttctttaccatctattgcgcttcaggaattgtcgcgggggcgcgtctgtttgaaagcaccttcggcatgagttatgaaaccgcactgtgggccggggcggcggcgacgattatctataccttcgtcggcggcttcctcgcggttagctggaccgataccgtgcaggccagcctgatgattttcgcgctgatcctcaccccggtgatcgtgattatttccgtcggcggctttggcgattcgctggaagtgattaagcagaagagcatcgaaaatatcgacatgctgaaagggctgaacttcgtggcgattatctcgctgatgggctgggggctgggttatttcggtcagccgcatattctggcgcgctttatggcggcggattcgcaccacagcatcgttcacgcacgtcgcattagtatgacctggatgatcctctgcctcggcggggcggtggccgtcggcttctttggcatcgcctacttcaataacaacccgagcctggcgggcgcggttaaccagaacgccgagcgtgtgtttatcgaactggcgcaaatcctgtttaacccgtggattgccgggatcctgctgtcggcgattctggcggcggtgatgtccaccctgagctgtcagctgctggtctgctcgagcgcaattaccgaagacctgtataaagccttcctgcgtaaaaacgccggtcagaaagagctggtgtgggtgggccgtatgatggtgctggtggttgccctggtggccattgccctggcggccaatccggaaaaccgcgtgctgggtctggtgagctacgcctgggctggcttcggcgccgcctttggcccggtggtcctgttctcggtaatgtggtcgcgcatgacccgtaacggcgcgctggccgggatggtgattggcgccctgaccgtgatcgtctggaagcagtttggctggctgggcctgtatgaaatcattccgggctttgtcttcggcagcatcgggattgtggtctttagcctgctggataaagcgccgtcggccagcatgcagcagcgctttgccgaagcggatgcccactaccatacgccgccgccggtacgcgccacggctgagtaagatcatctaatgctcacgagcccgccgctggcgggctttttattgcctggtgccgtgccggaatattataacccttgctaattatctgaaaatccgctgatatttcctgactaataacaatgaggatagcaaagatgacgttcagacagggtgcaatggcgctggtgctggcagggttactcagcggctgcgtggcgggtggaagttcatcgaccagcgcgccgaagcccggcgtctgcccggcggataagtccatggtgcaaaccacgctttacttcggtctgagccgcccggcggggaaagacatcaccgctgaagagtggcaacagtttgtcgaccgtgacgtcacgccgcgctttcgcgacgggctgacggtgtttgatgcccacggccagtggcttggccagaatggtcaggtggtgcgggagcagagcaaggcgctgatggtgatccatgggcatgacgcgcagagcgaggcgggtattgaggctctgcgccagggctataaatcacgcttcgcacaggagtcggtgatgcgtgtcgaccagccggtctgcgtgcagttctgagtaaacggcgggggcagccccgccgtttgttttacagcaccagcccggcgaagctggcggaaagcaggctcaccagcgtggcgctatacaccagccgcaggccgaagcgggagacgatattgccctgcggttcattcaggcctttgatcgccccggcgataatgccgatcgaggcaaagttggcaaacgaaaccaggaataccgagagaatgccgagcccgcgaggggtcatgctggcggcaatcttttgcagctcaatcatcgccacaaattcgttagcgaccagtttggtggccatgatgctgccggcgtttagcgcatcgctcagcgggatgccgataagccacgccagcggataaaagacgtagccgaggatctgctggaagctgagaccaaacagggtggcgaatagcgcgttaatggcgctgatcagggcgataaaaccgatcagcatcgccagaataatcatcgccactttaaagccggccagaatatattccccgagcatttcaaagaaactctgcgattcatgcagcttctcgagttttatttcctgctcgctgcccggccgcgtcgggttaattaccgacagcacgataaaggtgctgaacatattgaggatcagcgctgcgacgacatatttggcgtccagcatggtcatataggcgccgacaatcgacagcgatacggtcgacatggccgtcgccgccatagtgaacagtcgccgtgaggagaggtcgcccagtacgcccttgtaggcaatgaagttctccgactggccgaggatcagcgagctgacggcgttgaaagattccagcttacccatgccgtttactttcgacagcagggtgccaatcacgcgaataaaaatcggcaggatccgccagtgctggagaataccaatcagcgcggaaataaacacaatcggacacaggacgcccaggaaaataaaggctaagcctttttcgctcatgccgccaaagacgaaattggtcccttcggcggcaaagcctaacagcgaagcaaaaaagccggaaatattttttaccagccacaggccgctttcggcgtgcaggaaaaagaaagcgagcgctatttcgataataatcaactggagaatataacgaatacgaattttttgtctgtcgtagctgacaagccaggccagggcgaggatcaccgccagcgccagcaggaaatgaaaaaatgcagtcatgttgttcttttcgcaagtcaataaggccgccatttagccatagccgctacggcgggtaaatatctggcgtaaaaaatcctttgcttattctttcccttcataacaggcgaatattttcataagtcattatttgtcagcgatttatttacaactgatcatcattctctgcacatttcgcttgtgtttctgagcattgtaatgataatcactatcataaatattacctgtttttgcattcgttgacggtgttttacatttaagggtattggcatgtttgtcccatttctcattatgttacgcgaaggcctggaggcggcgctgattgtcagcctgatcgccagctatctgaaacgcacccagcgcggcaactggattggcgtgatgtggattggcgtgatcctcgcggcggcgctatgtcttggcttaggcatctttatcaacgaaaccaccggtgaatttcctcagcgtgaacaggagctgttcgaagggatcgtcgcggtcattgcggtggtgatcctgacgtggatggtcttctggatgcgcaatgtctcacgcaacgtcaagcagcagctggagcaggccgtggacaaggcgctgcagcgcggtaatcaccacggctgggcgctggtgatgatggtctttttcgcggtcgcccgtgaggggctggagtcggtcttctttctgctggcggcattccagcaggatgtcggtatctggccgccgctgggggcgctgctgggtctggccaccgctatcgtgctgggcttcctgatctactggggcggtatccgccttaaccttggcgtgttcttcaaatggaccagcctgtttattctgctggtggctgctggcctggccgcgggggcgatccgcgccttccacgaggcgggcctgtggaacctgttccaggataccgccttcgatctgagcaacgtgctgtcgacgcatacgctgttcggcacgctgctggaagggatcttcggttatcaggagacgccgagcgtcagcgaagtggctgtctatctgctttatctgatcccggcgctggtgctgtttgccctgccgccgcggaataataccactgcctcgcgggctgcctgaccgggcgctgcgagcttataagcgacactctacttaccgaaagggatgatcatgatgattcattttcgccgtaatgcgctgcgggtgaccgtggccgcgctgctcagctctgcattcggtgcacaggctgcggatatcccgcaggtcaaagtcaccgtcaacgacaagcagtgcgagccgatgcaggtgaccgttaacgcgggtaaaacccagtttattattcagaaccacagccagaaagcgctggagtgggagattctgaaaggggtgatggtggtggaagagcgcgaaaacatcgcgccgggctttactcagaagctcaccgcgaacctgcagccgggcgaatatgacatgacctgtggcctgctcaccaacccgaaaggcaaactgatcgtcaccggcgccgccaccaaagacgcggcgaaagcggatgcggtgctgagcctcggcgacgcgatcaccgcctataaagcctatgtgacggcggaaaccgcgcagctggttagcggcaccaaagcctttaccgacgcggtgaaagccggcgatatcgaaaaagcgaaagcgctgtacgccccgacgcgtcagcattacgagcgcatcgagcccattgccgagctgttctctgaccttgacggcagcatcgacgcccgcgaagacgacttcgagaaaaaagcggaagatccgaaatttaccggtttccaccgtctggaaaaagcgctgtttggcgataacagcgtcaaagggatggaaaaatatgccgatcagctgaacagcgatgtgctggagctgcaaaagcgtatcagcgagctggcgttcccgccgtcaaaagtcgtgggcggcgcggcaggattaattgaggaagtcgcggccagcaagatcagcggtgaagaagatcgctacagccataccgatctgtgggacttccaggccaacattgacggcgcgcagaaaattgtcgacctgctgcgcccgcagctgcaaaaagagaacagcgcgctgctggcgaaagtggacgccaactttaagaaagtggacagcatcctcagcaaatatcgcaccaaagacggtttcgaaacctacgataagctgaccaccgccgaccgtaatgcgctgaaagggccgatcaccaccctggcggaagatctggctcagctgcgcgggatcctggggctggactaagtcgatggcacagcagaaaccccacgacgtgaacgagccgtcacgtcgtcgcttactgaaagggatcggcgcgctggccatcaccggcggctgcccggtagcgcatgcggcaaaagcggaaagttccccggggacgctcacacccgacgcgcgccaggaaaagcagccattctatggccggcatcaggcgggcattctgacgccgcagcaggcttcgatgatgctggtggccttcgatgtgctggcggctgataaagccgacctcgagcggctgtttcgactgctgacccagcgtatcgcctttttaacccagggcggcccggcgccggacacgccgaatccgcggctgccgccgatggattccggcatcctggggccgtggattgcgccagataacctgaccatcaccgtctcggtcggccattcgctatttgatgagcgctttggcctggcggataaagcaccgaaaaagctgcagccgatgacccgcttccccaacgattcgctggatgccgcgctgtgccatggcgacctgctgctgcagatctgcgccaatactcaggatacggtgatccacgccctgcgtgatgtcatcaaacatacgccggatctgctgagcgtgcgctggaagcgggaagggtttatctccgacagcgcggcgcgcagcaaaggcaaagagacccccatcaacctgttggggtttaaggacggcaccgctaacccggcgagccacgacagcgcgttgatggataaggtagtgtgggtgacagccgatcaggacgagccggcctggaccgtgggcggcagctatcaggcggcgcgaattatccagtttcacgtggagttctgggatcggacgccgctcaaggagcagcagacgatctttggtcgcgacaagcacaccggtgcgccgctggggatgaaaaacgaacacgataccccggattacagtaaagatcctaacggcgaagtcattgcgctggatagccatattcgtctggccaatccccgcacgccggaaacccagtccagcctgatgatgcgccgcggctacagctattcgctgggggttactaacgccggacaactggatatggggctgttattcgtttgctatcagcacgatctggaaaagggttttctgacggtgcagaaacgacttaacggcgaggcgctggaggagtatgtcaaaccgatcggcgggggctacttctttgttttacccggcgtagtggatgataaacactatctgggagagtcgctgctgcaggcctgataccgaccctgcccgtaagggcagggcgttttctgctgtttttctcatttttcttatatttcctgccatgtgttatatttctgtaatacaaatgaccgatagtctcctacacttgcttaagaactatttgttgcgtcattgtgaaaaataagttgcattaagaatcttttttgatgtacttattacatacgcggtagttcccggcagtgtgacgtttcactatggagatcgcgaatggtaaggtcccgtaccggacaacgtaaaacctcagaccgtactcttcagcacggaagccccgcttccggcagcgattttcttactctttctctctccgcttcgcattattacaaccttggcagggtacgcggtgcgcgtagccgcgactcgttgtcagttctaccggcaagcaatggcttacaaggaagccaaacctcaatcgttcgtgcgcatagtcgcgtcgatgttgacgcgtgtgatgtaaaccaacaacgcaaggtgctatccatgggaagacaaaaagcagtgatcaaagctcgtcgtgaagcaaaacgtgtgctgagacgggattcacgcagccataagcagcgtgaagaagaatcggtcacatcgcttgtgcaaatgagtggcgtagaagcaattggcatggcgcgggacagccgtgatacttccccaattgaggcgcgcaatgaggctcaggcgcattatttgaatgccatcgacaataagcagctgattttcgctaccggcgaagctggatgcggcaagacctggatcagtgcggcgaaggcagctgaagccctgatccataaggatgtggacagaattattgttacccgtcccgttctgcaggccgacgaagatctcggcttcttaccgggagatatcgccgagaagttcgctccctatttccgaccggtttacgatgtgctggtgaaaaggctgggggcttcctttatgcagtactgcctgcgtccggaaatcggcaaggtggaaatcgcgccgttcgcctatatgcgcggacgtacctttgaaaatgcggtggtgattctggacgaggcccagaacgtgaccgcagcgcaaatgaagatgtttttaacccgcctcggggagaacgtgacggtcatcgtcaatggcgatatcacccagtgcgacttgccctctggcgtgagatctggcctgagcgatgcgctggcgcgttttgaggaagacgagatgatcggcatcgtgcgtttcaccaccgatgactgcgtgcgctcggctctctgccagcggacgctgaaagcctattattaatcgtcatactgtgagcaaggcccgggctagcccgggctttgttgttttgatccttgcgacagtctgaagtgcggataaaatttctgttttgagggatccatcgctgtatgtgatagaatttcttctctgtaatacaagaatatctgctttgctatacataagcgcctttctaataatttctttcgtcttacgccgttttactcatttaattgtatggatacttgtaagggaagcacaatggtcttacatgggaaagttatcaagttattaattactattttgatggtggggttgtcatccgctgcttatagtaaagattatcaggcagggaaaaacttcactgttattcattctactgttaagcaaccgccgccactggttgagtttttttccttctactgcggaccttgttatgcgtttgcagagcgcatcaatgttgatacagctatcagaaagcgcctgcccgacgatatgaaactggaaaaataccatgtcagccagatggggcctttaggaccagcattaacagaagcatgggccgtagcacaatatgctggggtagatggcaaggtggaaaagttattgtttgagggtttacaggttaagcgtgatattaaaacggcagctgatattgttatggtgtttaatcaacttggcattacgtcagagaaatatgccgaaatgcaaagtaactttatggtaaaagctttaattgccagacaggataatctggtcgaaaaaatgaaagtgcatggtacgccttctttttatgtttcaggaaaatatcatattaacaatacatcactcgcgcaagatgactatgatacctatgcagaggatatggctaatctggttttatttttgcttaacaagcccctgtaacacgaagtgagaaagtatcattaggtttgtctttttcgttctgtccgggtggcgttgccactcgtcgaaccccggtcgggggttctcatcccccccggcgggtgccacatgcgaaaaaaaagcccgtacttgcgtacgagctcttcttaaaatatggcggtgagggggggattgactcgcttcgctcgcccctgcggggcagcccgctcgcaggctcgcggtctgtccaactggcgttgccagttgtcgaaccccggtcgggggttctcatcccccccggcgggtgccacatgcgaaaaaaaagcccgtacttgcgtacgagctcttcttaaaatatggcggtgaggggggattgactcgcttcgctcgcccctgcggggcagcccgctcgcaggctcgcggtctgtccaactggcgttgccagttgtcgaaccccggtcgggggttctcatcccccccggtgggtgccacatgcgaaaaaaaaagcccgtacttgcgtacgagctcttcttaaaatatggcggtgagggggggattcgaacccccgatacgttgccgtatacacactttccaggcgtgctccttcagccactcggacacctcaccatattgtcttgctgctcaccttgggtgggcaacggggcgctactatagggagttgcgttaaaacggtcaagcatattttcttctttctttgccgttcgctcacgcaatgaacaatgccccgctgcggctcagcggggcgggcgttttagcgctgggaatccagctgttcgttattcttcacgacgtcctgcgctttgctgtagctttcgatcagcagctggtaggccgggaagactttggtgtacacctccgcccattctgcggcgtccgggcgattccaggtgcgctgcagctcagaggcgacggcggcggtatccattggcactacgccggcctgtaccacgcgagccagggtgatctcctgcgccattttgctgtaggtgccggaagcgtcaatcacggcaaacactttataaccgtcggcgacagcggcgatagccgggaaggccatgcagacgctggtgatggtcccggcgataatcagcgttttacggccggtcgctttcaccgcggcgacgaattccgggttatcccaggcgttaatctcacctttacgggcgatgtatttcgcatgcggcgcgttttcatgaatctccgggatcagcggaccgttcggcccctgcggcacggaggcggtcgtgatcaccgggatcccggcaagcgacgccatcttggccagcgcggcggcgcgagcgcgcagctctggcatcggcatatcgccgacggtctggaacagaccgctctgatggtcaatcaacagcattgcggtatcgttaacatcaatcaccggacgagcaccgttaaagttagcgggagtagacatagtattcacctcaatcagttagatttggccaaagcggccgctgttaaaatcgcgtacagcttctgcgatctgcgttttgttattcatgacaaacgggccatagcccacaatcggctcctgtagcggttctccggccatcagcagaacttttgccggggcggtcgcctccagatgcactgcgtcacctgcctggctcaggacggccagctggccttcgcgagcagattcggaaccgttaatgatcacttccccttccagcaccaccagcgcggtactccagccctccggttggcgcagcgtgaggtcgtgcccctgattcagctgcagatcccacacgttaagcggtgagaaggtatgggccgggccgctgacgtcgtcatactggccggcaataacccgaacctgtccggcgccgttcgccagcgccacggtggggatcgtcccggcggtaatgctctggtagccgggggtcgccattttgtctttcgcgggcaggttgacccacagctggatcatcttcagctcgccgccgctgcgggtgaaggcctccgagtggaactcttcgtgcaggatcccggcgcccgccgtcatccactgcacgtcgcctggaccaatcaccccgccgcgtccggtggagtcgcgatgctctacttcaccggcgtagacgatggtgacggtttcaaatccgcgatgcggatgctcaccgacgccgcgtttttcgctgcccgccgggaaggtgtacggcccggcatagtcgagcagtaagaaggggctcagctgctggccgtgcgtctgataggaaaacatcgagcgaaccgggaagccgtcgcctacccaatgctgcgcaggcgcggtgtagactcctgtgatctgtttcatggctttctcctgtgtatcggtatctgatgtgaataagcttatatccgggacgacgtatgcggtagtgtgcaaaaatgacctatactgttccaaaaatggaacaatggaggaaggatgcaggatctcaatgacttcgcctggtttgtccaggtggtagaccatggcggtttcgccgcggctgggcgagcgcttgaccagccgaaatccaaactcagccgtcgcattgcgcaactcgaggagcggttgggcgtgcgtttgattcagcgaaccacccgtcagttcgcggtcaccgaggtcgggcagaccttttatcagcattgcaaagcgatgctgattgaggccgaggcggcgcagcaggcggtcgagacgctgcgcgccgagccgcgcggtagcgtcaggatcacctgtccggtcaccttgctgcatgtccatatcggaccgatgctggcgcgatttatggcgcgctatcctggggtaacgctgcatcttgaggcgaccaaccgccgggtggatgtggtcggggagggcgttgatgtggcgatccgcgtccgtccccggcccatcgaggatagcgacctggtgatgcgcgtgctggcggaccgcgggcaccggctggtagccagcccggatctcatttcccggctcggacgtccgcaggcgccgtccgagctgagcgcctggccgggcctcagcctgggtgcgaacaagcatcagcataaatggcagctcaccgggcccgggggagcgagagcggaagtgtatttcacgccgcgaatggtgaccaccgatatgctggcgctgcgcgaggcggcgatggccggcgtaggcgtggtgcagcttcctttattaatggtgcgcgatcagctggcgtcaggtgaattagaggtggttctggacgagtggcagccgcggcgggaagcgatccatgcggtatttgcctcacggcgcgggctgctgccctccgtcagggcgctggtggactacctcagcgaagagtatcagcggatggaggaggattagcttcgggattggcttttctcgaggggctcccccccccggcagagaatataaaagaaaagagcccgtgcttgcgtacaggctctcatcttgaatatggcggtgagggggggattgactcgcttcgctcgcccctgcggggcagcccgctcgcaggctcgcggtctgtccaactggctgcgccagttgtcgaaccccggtcgggggttctcatccccccctgtggagaatataaaagaaaagagcccgtactttcgtacaggctctcatctcgaatatggcggtgaggggggattgactcgcttcgctcgcccctgcggggcagcccgcttactgcgtgcgcggtctgtccaactggctgcgccagttgtcgaaccccggtcgggggttctcatccccccctgtggagaatataaaagaaaagagcccgtactttcgtacaggctctcatctcgaatatggcggtgagggggggattcgaacccccgatacgttgccgtatacacactttccaggcgtgctccttcagccactcggacacctcaccatattgtctttcccgttgttgtcgggaacgggcgctaatgtagggaaatacgtatcgcccgtcaatcaactttttgcaaaaaaagcgcgtttagacaaacttcgagcaacttgctccttaaacgtgcgaaatccgttttttttgtcgccagtagcttttcccttttcgctcgggggaaatttgttatgctggcaaaccaatagaaaacaatgagtaaaataagacgccagcgttaatcggccaaaggcgtctgctatcaggagcccctatggagattattttttaccatccgacctttgatacccaatactggatctgtgagctggaaaagcagttacccggcgcgcgggtgcgcgagtggaaagcgggcgataaccggccggcggactatgccctggtctggcatccgccggtagagatgctgcagggccgggcgctgaaggccgtgttcgccctcggggcaggggtggactctattctcagcaagctgcgcgaccatccggatatgctgccgctgtcgattccgctgtttcgtctcgaagataccggtatgggacggcagatgcaggagtatgccgtgagccaggtgctccactggttccgccgctttgatgactatcaggcgctgaagctggcttcccgctggcagccgctgcccgagtaccgcgccgacgaattcaccgtcgggattatgggcgccggcgtgctgggggcgaaggttgcggaaagtctgcaaccctgggggttcccgcttcgcgtctggagccgtagccgcaaatcctggccgcaggtgcagagcttcgccggccaggccgagctgggcgaattcctgcagggcactcgcgtgctgatcaacctgctgccgaataccgccgaaaccgccggcattattaaccagacgctgctggcgcagttgcctgatgagagctatgtcctcaaccttgctcgcggcgtgcatgtcgttgaagaggatctgctggcggcgctgaacagcggtaagctcaaaggggcgatgctcgatgtcttcagtcgcgaaccgctgccgcaggagagcccgctatgggcgcatccgcgggtggccatgaccccccatgtggcggcagtgacccgtccaatggaagctatcacctacattgcggagaccattagccggcttgagcgaggggagccggtaagcggtcaggtcgaccgccagcgcggttattaagacgagagaaccccgccacggcggggtttttgctaatcaatagcccggtttcctgctattcttgcggcaaacagaagaggagaatgtgatgtatcccgttgacctgcacatgcataccgtcgccagcacccatgcctacagcaccctgcacgattatattgcggaagcaaagcgtaaagggatcaaactcttcgccatcaccgaccacggcccggacatggcggatgctccgcactactggcacttcgttaatatgcgcatctggccccgcctggtagacggggtggggatcctgcgcggtattgagtcgaatattaaaaatattgaaggcgagatcgactgttccggaccgatgttgacttctctcgatctgatcatcgccggatttcatgagccggtgtttccgccgcaggatcgtgacacccatacacaggcgatgatagccgcgatggccagcggtaaagtgcatatgattagccatccgggtaatccgaaattcccggtggatatcccggcgattgccgaagcggcggctcgctaccaggtggcgctggagattaataactcctcgttcgtatcatcgcgcgtgggcagtgaagacaactgccgggccatcgccgccgcagtgcgtgatgccgggggatgggtggcgctgggctcggactctcacaccgcctttacccttggggaatttaccgaatgccgcaagatccttgatgcggtcgatttcccggaggagaggatcctcaacgtttctccgtgtcgcctgcttaacttcctcgagtcgcggggcatgccggcgatcccggaatttgctgacctttaatttgtataactggaataactgaatgaacgagttttcaatcctctgccgcgtgctgggttcactgtattaccgtcaaccgcaggacccgctgctggtgccgctgtttaccctgatccgcgagggcaaactggccgccagctggccgcttgagcaggacgagctgctggcgcgtctgcagaaaagctgtgaaatgcaatccctggcgacggactataatgcgctgttcgtcggtgaagcctgcagcgtcccgccgtaccgtagcgcgtgggtggagggttcctcggaagcggaagtttgggcttttctgagcgaacacggcatcccgacaggggaaggtccggcggatcatctcggctcgctgctgctggccgcctcctggctggaggatcatgccgcagaagaccagagcgagacgctggagctcctgtttgccgactatatcctgccgtggtgcgggacgatgctggggaaagtcgaagcccatgcgcacacgccgttctggcgcaccatggcgccgttgacccgcgacgccatcgccgcgatgtgggacgagcttcaggaagaagatgagtaataatatgtgatgtaaatcactgtttgaatgaaactgaaagaaatttcattcatatactgtgttttagatcgcattcttccggcgcgtatctgctaggatacgcgccatgaacatactcttcgcaatcgcattaacgacaggcatcctctccgggatttgggggtgggtggcggtcgctctcggcctgctgagctgggccggattcctcggctgtacggcctatttcgcctgcccgcagggcggcttgaaagggctggccatctcgtcctgcacggtgatgagcggcgtggcctgggcgttagtgattatccacggtagcgcgctggcgccacaggtgcagatcctcagctatatgatgaccggtgtggtcgccttcctgatgtgcattcaggcgcgacggacgctactgtcgtttgtcccgggcacctttatcggcgcctgcgcgaccttcgcggcagacggcgactggcgtctggtgatcccttccctggcgctgggtctggtctttggctatgccatgaaaaatagtggcctgtggctggcggcccgtgcggataagcataaatcgttcgccaacgacaacgcctgatcggcgggacgactaaaaaacaggaccttacgggtcctgtttttttatcttctcgtcaccggacaaagcgataatcttgctcccgcaggcgagaatgccctagtatcggcagaaagccgtatccacacgctatgccgacaggaggagaaatggctgttaaacctgaggtaattctcggcgatattacgacacttgatgtcgatgtgattgttaatgcggcaaatccctcgctgctgggtggtggcggagtagacggggccatccaccgggcggccggtcccgcgctgctggcggcttgcaagcaggtgctgcagcagcagggcgaatgccctcccgggcatgcggtaattactattgccggcaatctgccggccagcgcggtgatccacaccgtgggcccggtctggcacggcggcgaccgcatggaggcgcaaaccctggccgatgcttacaaaaacagtctgcagttggcctcggcaaacaactatcgctccattgcgtttccggcgataagcaccggcgtgtatggctatccgagagaggaagcggcggcgatcgccgtgcgcaccgtcaccgcgtttctcactcgctataatcctcttgagcgcgtcctgttcgtctgttttgacgaggaaacggcggctatctatcgccgcctgctggcgtcatacccctgattcaacagaataggctatgataaccgccagtcttgacgggaatgatgggtagcaggagggagcagggtgtcagaaggaaaagtccagcagaaacagcaggcgcgccgcgcggagatcgttgtcgccgcgcaaaaatgtttcgctgaaaaggggctgcacggcgcttccgtcgccgatatcgcccgggaagcgggcctgagcgtgggtcagctatatcgcatttttgccagcaaggaagcgatcatcgaagcgattgttagcgaaatcgtcaacgccagagtcggggagatgatcgatgagaaccacaatctggcgcgtaaagcggcggttttggccggcaggatcccgacgtcggcagccaccaaaagcgataattatctgctgatggagatcaatgccgaggcctcgcgtaacccacgcttgcgtgagatcctgatgcaggccgatcggcggttgaaagaggagggcggtcgcctgtcgcagcgcaaccatcccgggctcagcgatgcgcgacgcaatgccgcatcagagctcatcgccgttctgacagagggggcagcttaccgctgtgagctgagcgcctccaccccggtcgataaggcagatttagaagccctgtacaatatgattttcgaccggctttttgacgagcaggcataatacggcacgcctggcgtgccgcacaggctagtggttagctggccgaggctggggttttggccggtttgttcatcggtttaccggagaacaggaaacgcagcagcggaatgcgcaggtgaatttcatacaggatcagggcaatacccaccacaaaaactaacccgccaataaagcctaaggtattggacttaatgaccggggtgatccacgccccgtacagcagcgtcagcggatggtgcaccaggtaaataaacagcgaagcattgacgaaataggttacgcgcgccgactggaagttcagcaggcgatggccgagcgaaaagaccacattgaccatccacagcccaagcaccatggtgatcaccgattccgtttcatacatccagccgtcgccggagccgtactgctggttcagccggtaggcgataaatcccagcagcgccgctgcgcagcaccatggtgacggggtggtaaacatcgccttcagacgcggattaataaaggtctgcgcccccagcacaaagaagggaagatagaacagcgtctgcatcaccacaaagttaaacagaccattgctaagcagcggcgggtaaatcaggaacagcgatcggcggatcagcgcgtaaagcacccccagcgcaaggaaaatcatcgttagctggcccatagtgacagtgtcaccaaaggctgaggcgccccctgccgggcggcgcgtcagccatttaaacagcaccacgcccagcgaggtcagcaccaccagcaccagtaaaaaccacaggtgggaaataagctcccacgccagggtgttaaatttgtcgtacccggaaagggtgtgccagttttccgccttgccgttgacgtactgcagcataataaactgcggcagcgtcagcagtgggatagcggtcagcatcggaataccgacccgttcgacgcgcactttccaccactttttcaacgggtagcgcaggaacagcatgtaggagaaatagccggagatgacgaaaaagacctgcatccggaaggcatggatgaagtcattaaacagcgtcaaccaccacgagggctcagcgctgttgacatgccagctgtggctggaatagatcagcgaaatgtggaaagggatccccagcagcatcagccaggcgcggatgctgtcgaagaaatattcacgctgtaccggagtattattcatacgattcacgacaatctcagataattcgtcttatcactcaagatgataacgcttacattatcagcaaccctacatgaactcggggtacctgtctccaggataagcacgcaaagtgcaaacgggatagcgaactgtttattccctgcgccgctacgctgaacaaagcagggattatgttgtcggattgcctgagtttccattaaaatagatcggatcgatttaagcacacaaagggggaagtgcttacttatatgaaacataaaccacagatgatgaaaatgcgttggttaagcgcagccgtaatgttgtccctgtgtacttcatctgcatgggcatttagcattgatgacgttgcaaaagaggccaaaacgttagccgggaaaggctatgaagcgccgaagagtaacctgccctccgctttccgcgacatgaaatacgcggattaccagcaaattcagtttaatcacgataaagcttactggaataaccagaaaaccccattcaagcttgaattttaccatcagggtatgtacttcgacacgccggtcaccatcaatgaagtgacggccaccagcgtgcgcaaaattaaatatagcccggactattttaactttggtaacgttcagcacgataaagacacggtgaaagacctcggtttcgccggcttcaaagtactgtatccgatcaatagcaaagataagaacgatgagatcgtcagcatgctcggtgccagctacttccgcgtgctgggtcagggtcaggtttacggcctgtccgcgcgcggcctggctatcgataccgcgctgccgtccggcgaagagttcccgcgttttcgcgagttctggatcgagcgtcctaaagccaccgacaaacgtctgactatctatgcgctgctggactccccgcgggcaaccggcgcttatcgctttgtcatcatgccgggacgcgacaccgtggtagatgtccagtccaaagtttacctgcgtgacaaagtgggcaaactgggcgtggcgccgctgaccagcatgttcctgttcggttccaaccagccttctccggcgcttaactatcgtccggcgctacacgactccaatggtctgtcgatcctggccggtaacggcgagtggatctggcgtccgctgaacaacccgaaacaccttgccgttagcagctatgcgatggaaaacccgcaagggttcggcctgctgcagcgcggccgtcagttctcgcgcttcgaggatctcgacgatcgttatgacctgcgtccgagcgcctggatcaccccgaaaggggagtggggcaaagggaaaatcgaactggttgaaatcccgaccaacgatgaaaccaacgataacatcgtgacttactggacgccggatcagctgccggagccgggcaaggagatgaacttcaagtacaccatcaccttcagccgcgatgaagacaagctgcatgcgccggataacgcttacgttatgcagacccgccgctctaccggcgacgtgaagcagtcgaacctgatccgccagccggacggcaccattgctttcattgtcgacttcaccggcgccgatatgaaaaaactgccggcggataccccggtcgccgcccaggcgagtaccggcgataacgctgaaatcgttgaaaataccgtgcgttacaatccggtgaccaaaggctggcgaatgatcctgcgtttgaaggtgaaagatccgaagaaaacgacggaaatgcgcgccgcgctggttaacggtgatgacacgttgagcgaaacctggagctatcagctgcctgccaatgaataagataacaaagtacattgacgcattgccgctgtcggacgccgagaaatcggcgctgccggacaccagcctgcaggccgttcatcaggccctggatgacgaccatcagaccttcgcccgcgaagacgactccccgctggggtcggtcaaggcacggctggcgcatagctggccggattcgctgtctggcgatcagctggtgaaggacgatgaaggccgtactcagctgcatgcgatgcctaaagccaagcgctcctcaatgatcccggacccgtggcgtaccaacccggtcggccgcttctgggaccgtctgcgcggacgcgatgtcacgccgcgctatctctcccgtctgacgcaagaagagcgcgagagtgagcaaaaatggcgtaccgtcggcaccattcgtcgctatatcctgctgctgctgacgctgtcgcagaccgtggtagccacctggtatatgaaaaccattctgccttatcagggctgggcgctgatcaacccggccgacatggtggggcagaacctgtggatctcgttcatgcagctgctgccgtacgtgttgcagagcggtattctgatcctcttcgcggtgctgttctgctgggtttccgccggcttctggaccgcgttaatgggcttcctgcagctattgatcggccgcgataagtacagtatttccgcctcgacggtcggtgacgaaccgttgaacccggcgcaccgtacggcgctgataatgccgatctgtaacgaagacgttgaccgcgttttcgccggcctgcgggcgacctgggagtcggtgaaagcgaccggtaacgccgctcatttcgacgtctatatcctcagcgatagctataaccccgatatctgtgttgctgagcaaaaggcgtggatggagctgattgccgaagtgcagggcgaagggcagatcttctaccgccgccgtcgtcgtcgagtgaagcgtaagagcggcaacatcgatgacttctgccgccgctggggcagccagtatagctatatggttgtgctggacgctgactcggtgatgaccggtgagtgtctgagcagcctggtgcgcctgatggaagcgaacccgaatgccgggatcatccagtcttccccgcgcgcctcgggcatggatacgctgtatgcgcgttgccagcagtttgccacccgggtgtacggtccgctgtttacggcgggtctgcacttctggcagttgggggagtcccactactggggccacaacgccataatccgcgtgaagccgttcattgagcactgcgcgctggcgccgctgccgggcgagggcaactttgccgggtcgatcctgtcgcacgacttcgtcgaagccgcgctgatgcgccgtgccggctggggggtgtggattgcctacgatctgccgggctcctatgaggagctgccgccgaacctgctggacgagctgaaacgcgaccgtcgctggtgtcagggcaacctgatgaacttccgcctgttccttgtcagagggatgcacccggttcaccgggcggtgttccttaccggcgtgatgtcctacctgtcggcgccgctgtggtttatgttccttgccctgtcgacggcgttgcaggtggtgcatgccctgaccgaaccgcagtacttcctgcagccgcgtcagctgttcccggtgtggccgcagtggcggcctgagctggccatcgcgctgttcgcctcgaccatggtgctgctgttcctgccgaagctgctgagtattattctggtgtggtgtaaagggccgaaagagtacggcggatttatccgcgtcacgctttcactgctgctggaggtcctgttctcggtcctgctggcgccggtccgtatgctgttccacaccgtcttcgtggtcagcgccttcctcggctgggaggtggtatggaattcgccgcagcgtgatgatgactccacgccgtggggggaagcctttatgcgccacggctcgcagctgctgctggggctggtgtgggcggtcgggatggcatggctggatctgcgcttcctgttctggctagcgccgatcgtcgtctcgctgatcctctccccgttcgtatcggcgatttccagccgggcgacagtgggcctgcgcaccaagcgctggaagctgttcctgatcccggaagagtattcgccgccgcaggtgctcaaggataccgatgcgtacctgacgatgaaccgtcagcgttcgctggacgatggctttatgcacgcggtgtttaatccgtcgtttaacgccctcgccaccgcaatggccactgcgcgccaccgtcaggggcatatcctggagatcgcccgcgagcgccatgtcgagcaggcgctgaatgaaacgccggataagctgaaccgcgatcgtcgactggtgctgttgagcgacccggtaaccatgtcacgtctgcactatcgcgtatgggccgcgccggagaaatactcttcatgggtgaacgcctatcagcagttggcgcttaacccgctggcgctgaaaacgaaataagccgtacgttaaggaaaataccggcagcgatgccggtatttttttatctgaaatacgaggatgtggatgcgaatactaccgatcattgccatggcgctgctgctcagcggctgcggcagcattatcagccgtacggtgcccgggcaggggcatggcaatcaatattacccgggcgtacagtgggatgttcgcgattcggcatggcgctatctcaccattctcgacctgccgttctcgctggtatttgatacgcttctgctgcctctggacgccagccacggcccctataactgattaacgctcgtcccactcgtcggctgccgtctgcccctcttcggtgtccagcgagggctcgagctgaaattcgccttcatcccattcgtggagcgtattttcctccagccactcctgacgcagctctatctcatcataatccccgtcgaagacgctctgcgcggcttcgccgctgagcatcgggaggcattcgccttgttcctcttcgtcagcaaaaaattcggcctgccaggcgatatcgccatcctgcagcacatacttttgaatgttgagctgctcaacgttggcgctctcttcatcgctgtcagggttgttggcgagaaattcttcacgtgctgcatcaatagcttcttcaagcgtggcgtagaacatcgaatcctttggcatagcgaatctcctgagaagaatatgaattgaacacgattcaatctatagaaggcggtacgcacggcgtcaagggacagagcccccctcgacgttaatttactgaatgcgaagtatccgcggctggccgacgcaggctgagggtggagtagatcgcattaaacaataccacccctgcggtgaccagaaatacggcgcggaagccatagttagcggaaaccgacgcgccaatcagggggccggtaacgttgccaatatcgcggaacgactggttatagctgaagattcgcccggagatctggctggtggagttgtacactagcagggtttgcaccgccggcagcagcgcgccgtccgcggcgccgagcaggaatcgcaggatacctaactgcagcggggtctgaacgaacgacatcgggatcaggagtagcaccgagataatcagcgccacgatgaggattttttccggcccgatgcgatcccccagtttgcccagccgcggggcgctcatcagcgcggcaatacccggcaccgaggcgatcattccgctgataaaggcgatgttactgacgttgcccgcgagatcgcgtacataaagcgtcaggatcggcgcaatggaaccggtggccacctggattatcagcgaggtcacaaacaggctgagcaccagtttgggattctgcagcgaggagaacacctctctggcactgagcatctctttcctggcgatcggcacaaaattttcgcggattaaaaacagggtaaacaagaaacagataaatagtaccgccgcggtcataaagaagacggtgcgcaatccccagtggtcggccaggaagccacctgccagcgggccgagcagggcgccgcttaccgcgccggtagacagtgtccccagcgcccagccgcttttatggcgcgggatctgggtggcgatcagggcgttggcgttaggaataaaaccgcccagcaggccgagcagtgcgcgcagcagcagaaactgccagatattctgcgccattcccatcagcatcatcacgatggccatcccgagggcggaacgcagcagcatgatttttctccccttgcgatcagcaagccccccccagaacggcgaggcgatggcggagaaaagaaaggtaatactaaagaccagcccggaccacatgttcagggcgctatgcccggtgacgccgagctgttcgacgtagagtggcagaaagggcatgaccaggctgaaggcggcgccggttaaaaagcagccaagccaggtcacggtcaggtttcgtttccagttaatgggggtttcagcagacgacatagggttccactggcctgcgcggcaggtcaaattaagagaaaatatgagcctgctaattatgcgcctgagaaatagatgccgcaatggaggagagcttttaaagctaaaggagagcctaaagcctgagcggcgaagcttcccggccgggatgagcgcggccgggaaaagggatcagtagcgggagggcatgccttcggggcgggttttgaagcgacgatggagccacatatactgttccggggccatcatgatgcactgctcaacgatcttgttcatccacgcggcggtggtttccgcgtcgtccagcggcggggaacactctggcggcaggataatcagttcataacctttaccgtccggtttgcggcgcgggacgaagggcacgacgcaggctttggacattttcgccagcatccaggtgccggaggtggtcgccgcttggtcgaccgcaaacagtggggcaaagacgctggcggtcgggccgtaatcgtgatccggtgcgtaccacaccacttcgccttttttcagtgcccggatcatgcctttcagatccttacggtcaatcatatccttattggagcgcaagcggccccaggtctgcagccagtcgatcaccgggttgtcgttggggcgatagacgccaatccccggctcgttcataccgaacatccgcgcacccatctcgagagtgaggaaatgaataccgatcagcagaatgccgcgctgctgcgcctgcacatcgcggatatgctcaaagccgatggtatcggtccagcgggcgatacgacgaaccggccagaaccaggccatccccgtctccatcagccccatgcccaccgattcaaagttcatcaccaccattcggtggcgttcctgctcgcttttctcggggaagcagagctcaaggttgcgataggcgattttcgcccggcgcttcataaagcgcatggccagccggccgatggcgttcccgaggcggtagatcagcgggtagggcagttggacaaccagccacagcaggccgatacccagccacagcagccaatagcgcggatgcaacagcgccggagaaaatttaggcaaatgagtcatttcatacccgtatcagtgagcaacgtcttatattatcgcatttttttaccggccagccaaaggcggcggcagtcagctcgttttgttaagcggggcgcgaccgggtgagagaaatgtagcgtaaaatgtagggatgtaaattaaacagctttgctatatcatgcccgccgtttatttcctcatttctatgtcgagcaggtacaccatgccagtgttacacaaccgcatttcaaatgagacgttaaaggcgcaaatgctggctgaaaccgagccgcgcacgacgatctcgttctataaatatttcactattgtcgacccgcaggcgacccgcgatgcgctgtgggttgccttaacccagctgaaggtttttggccgcatctatctggcccgggaagggatcaacgcgcaaatcagcgtgccgcaaagcaacgttgaggctctgcgtgagtttctctatggcttcgatccggcgctggcggggctgcgtttcaatatcgccgtggaggacgatggtaagtctttctgggtgctgcgcctgaaagttcgcgatcgtatcgtcgccgacggcatcgacgatccctcgtttgacgcctccaacgtgggggagtatctcaaggcggcggaagtcaacgcgatgcttgacgatccggatgccgtgtttatcgatatgcgcaaccactatgaatatgaggtgggccatttcgaaaacgcgctggagatcccggcggataccttccgcgaccagctgccgaaagcagtggaaatgatgcaggaccataaagacaagaaaattgtcatgtattgcaccggcggcattcgctgtgaaaaagccagcgcctggatgaagcataacggcttcaataaggtctggcacatcgagggtggcatcatcgagtacgcccgtcgcgcccgcgagcaggggctgccggtgcgtttcattggtaaaaactttgtctttgatgagcggatgggcgagcggatctccaatgacgttatcgcgcactgtcatcagtgcggcgcgccgtgcgatacccatactaactgcctgaacgatggctgccatctgctgtttatccagtgcccgagctgcgccgagaagtttgccggctgctgtagcgaagcctgcatggaagagcataagctaccggaagaggagcagcgtaagctgcgcgccgggcgtgaaaacggcaacaaaatctttaataaatcccgtggccggctgaataccaaactcgggatcctcgacccggagccgtcagaaaaaccataaccagacgagatcgatgatcgccagcagcagccagagcgccaggtagatcataaaatgctcgcgcacgttgttgaccagcatattaaacaggcgacgcataaccgctctcaatcactaacggcctcagcagaggccgtttctttacccaacggcaaaagtgccgcattccattacgcgttaaagcgcgccagagaaaagggggccagattgaagctcgatgcttcgccctgagcaaactgactggcaatttcgcccagcaccggcgcaaacttaaagccgtggccgctcagcccggtgatcagcagcgtgtctggcctgcctggcaacgtatcgataataaagtcctcatcgacggtattgtcgtaggtacaggaggcgccgtgcaggcagccgccgatgccaggcaggacgttacgcaaaaacgggaaggattcggaaccatcgctggcgacagcgccaaacgctacccgctcctgcggggtggagatcggctggccgccgttatgcttgccaattttcagttcattatcttccgccgggaaaccgtaatattgatcgccgttgggcaactcgccggtgaaggccgggaagtgattcttgctgctgtaacggccatcggcctggtaccaggcgaacaccttgcgtaccggctggatagggaggtccggaagcaggcgggtgacccaggtgccggcgctgaccagcagttttttaccatgatattcaccgtcgagggtatcgatggtgatcccgtcagcatggtgatgaatagccgagaccggacagttgaatagctgcgcgcagcctgcttcccgcgccagacggatccaggtttcgacggccagttcgctgcgcagtacgccggaagcgggttcgaaaatcgcccgatagtcatcggggaggcgtatctccggccagcgctgcatcacggcctgggcatccagctcttccacctcaagctggaacgcacgggcgctggcggcgacgttggcgagaaaagcggagctggcggggccgaggttaatgacgccggtgcgttcaaacacggcttcgccactgatctctgccagttcatcccatagctgctgggcacgcagcaccagcggaacatatttctcaccttcgccataggcgtgacggataagacggctgctgccgtgatggctgccttcctggtggggaggttgatgggcatcggtcatcagaacattgagtccggcacggcgcgcataatagccagcggcggcgccgacggagccgctgccaataatgataagatcgtattgcatggtgagttccgggtaattgccttgttagcagggtaattaactccctgtgcttatacaagcccgaaaataattcaggcacccgcaggtgcctgttaagtttaatgttaagtcattcgcaagccgcgttaatgtcggcgatactcgttttcctggtattcgccagattcaatcttcgcaatgcctgcttccaggattgaaataaactgacgtgcgacgtccgtcgttagccatagcgtctggccgatctcagcatcattactgttttcttgagtggggttctggtagtgcaggcgcaacatcagcgcatcgtagctatcaacggtgctgatgtcccatccaacgaggggatgggtctgaatgacttcattatttttttccatcataaccccttattcatatgttaaaagacaacaattctcgaggtttaatgcatattttttgaagcaagttaattatatcagggatcaagaataaactcgagaaattaaatgaaaggcagcatgattttcttcttttgccgcttttttactcaagataagcgcgtaaaatggccactttagtcgatattgagcagaataatcaggactattctgaacagaagaggggataaaaaaagccggggcgacccggcaaaaaaagcacaatgagggagcaaaccagagtaactggatcccgccatgcttcaggagagatcgtggacaaaccagtcgtccgcgctttcccatgtttcctgcaggatttcgcttatccggtctttgtcttctttcagggcgccaaacaccgagagctgattaccggtggcgtagcggacgctcacctggctatcgatggccgggaattgctcggcgatacggcgagagagttcgttattcagcgcttccagcgcgccgttaggtaaggcggtcgttttggcgatagacacttcaatgcgcataattgccccctgcgtttgatactggttatttatacagtatccggttggcgttgacaacagggggctgcgtttttatttcttcacggtccagcgaacggtttcacccgccaggaagggcaccagggcgtcattaggcagggcaatgctgtccacaacggtcgtctcttcacgcaccagttcaacgtagctctcattgaccggcagaccgtagaagcgcgggccgttcagcgagcagaaagcctcaaagtgctgcagagcgttcatttcttcaaacaccgtggcgtagctgccgagggcggtcggggcgttaaagcagccggcgcagccacagctggcttccttacggtggcgggcgtgcggtgcggagtcggtgccgaggaaggcgcggctgaagccgctggcgaccagctcccgcagagcctgctgatgaatattgcgtttaagtaccggcagacagtacaggtgagggcgaatgccgcccaccagcatatggttgcggttgaacatcagatgctgcggggtgatggtagcagccagcagttcgttaccgtcacgcacgtactcggcggcgtctttggtggtgatatgttcaaaaaccactttcaggccgggcaggcgctggcgcaggggctccatcaccgtctcaataaagcgcgcttcgcgatcgaaaatatcaatctcggcgtgagtgacttcgccgtgaacgagcaacggcatccccagcttttccatccgctccagcactggcataatggcgtcggtgctggtgacgccgtggctggagttagtagtggcattggccgggtagagcttggcggcggtgaacaccccttcgttaaagccgcgttccagctccgctgggtcgagagagtctgtcagatagcaggtcatcagcggggtaaaatcatgcccggccggcacggcgtccataatgcgctggcggtaagcgatagccgccgcgacggtggtgacaggcggcaccagattcggcatcacgatcgcccggccataaaactcactggtataaggcacgacggttttcagcatatcgtcatcgcgcagatggatatgccagtcgtctgggcggcggattttcaatacctgggattgtgctgtcatggaaggctccggctaataggttcagtcatcagggctgttttttgccgggcactaaggataagcgtaaacgttttcctttgcactcatttccgtaaaaaattcagggcgccgtagcgccctggagattaattggtaaaggggatgacaatctcgcctggcttcacctctatacctttggcgtatttcttcgccagcgcttcgccggtgctggcgtcctcacgcaggacataagccggctgctggctgaagtagctgcgcagagactgattcaggtaggggagcagggcctgaataaccgactgcagcttctccggcgccactttggcatcgaccacttctatttcctgcaggaagatggcgcctttctctcggtcaaaggttggcagcgctttgagcttcagatcgatcgtcgctttctgcgtgccgaacagggagttaagatcgacgttggcgatcccactcagggtgactttgcccggctcctcgcgcccgatagcgctggtcaggttctgcagttcgatatgggcgtcggcaacgcctttcagaccaatatctttggcgaaatggtttcgcttctgcagggcctggttaatctcctgctcgcttaccgtgtattgggtcagctgattacagccactcagcaggccgctgacaattagcgcggcggcgatcaatatctttttcatggggttcctcaagctcataccttccttcatcctgacacaaagcatcatgacctgtcagcacccatcgcgccagcagaataggctgaaagcaggagaaaccgccgccgcgcgcatcaggtgcgcggctccagcataccggaggcagagcgtttcggactgaattgccaccatagcgccaggaaggtgataaccccgatggcgccgagcatcagccacggcagttcgggctggccgacggctttcccggcatcaaacagccagccgccgcccgcgtaacccagcgcgccgccgaaggcgagccccagacggctgaaacccatatagctgccacgcgcccgggcgtccgccagcgaagcgcccagcgtctcgcgggcgggttcggcaatgatagagccgatgtaaaacaggcaaatcagggtaaacagctgctgtaaactgctggtcatcccgatggggagcatggccagggtcatcaccagcagaccggccatcagccggtgctcaaggcggaagcgtttttcgctccaacgggcaataggatagagcagggtgagcgaaatggtggcttcgatggcgtacatccatttcacggcggccggcgagccggcgatgtcattcaccatgatcggcagcatcagcatcacctgcaccgccagcatataatagccggtcagcgtcaggacataggtgacgaagcgtttgtcccgcagcacccggcccagaccctcgcgaatcggcgttttcaccgtcgagagcttccatgccggcagataccaggcgttaaacgcggcgcaggcgataaacagcgcggcgccggcgctgcacaccaggcgaaaatcatactgcagcagccagctgcccagcagcgcgccaatcaccgcgccggcgctatcctgcatcatcaggatggagaaaaagcggccgcgctgatgcggacgcaccagcttaaccaccagcgccgcccgcggcggatcgaacagtgtaccgccgagtccggagagtatgcacgagaaccacagcacccacggctcatgggcgacggccatcgccgcgaaaccgccggcacgcatcagcataccggtgacgatcatcggtttcgcgccgaagcggtcggcgatggcgccgccaaagatgcctaatccctgctgtaccagctggcgcaggccgagcgcaatgccgaccatcagcgctgcccagcccatctgatcgacaaagcggatggaaatcagcggaaaaacgacaaaaaagcccagcacgaccagcatgttatcgactaacaggaaatatttacccaggctccttgcctgcgagacgcgggacatttcccctccagggaaaaatagagataagcgaggatattctgcgggcaatctgctgcttttcccagcacccttgcgacaatatttttttatcaaaaagcaagatcgattgagcctattcatcgaaaagaggagatggcgcagaaaatggtatgttgctgttttcacactatcgtgcaggaaaggtatagtgatgaaagcaagagtgaagtcagggggactgaaaaaggaaatgtttggctatcgcagtaacgtgccgaaggtgcgtttgacgacggaccggctggtggtgcgcctggttcacgatcgtgacgcctggcgtctggccgattattacgccgaaaataaagcgttcttaaaaccctgggagccggttcgtgacgacagccactgctatccctccggatggcaggcgcgtctgtcgatgatcgctgagtttcataagcaggggtcagctttttatttcgcgctgctcgaccctgaggaaaaagagatcatcggtgtggcgaatttctccaacgtggtgcgcggatctttccatgcctgttatcttggctattccattggcgagaagtggcaggggcaggggctgatgtttgaagcgctgacgtcggcgattcgctatatgcagcgcacgcagcatattcatcgcattatggccaactacatgccgcataatcagcgcagcggcgcgctgctggcgcggttggggtttgaaaaagagggttacgccaaagattatctgctgattgacgggcagtggcgtgaccatgtactgacggcgctaacgacgccggactggtctgcgggacgttaaggagagaggatgaaatatcagttaactgcgcatgaagcgcgcgtcattggctgcctgctggaaaagcaggtcaccacccccgagcagtatccgctgtcggtaaatgctgtggtgaccgcctgcaatcagaaaaccaaccgcgagccagtgatgtcgctgagcgaaagcgaggtccaggccctgctggatacgcttgtgaaacggcactatctgcgcacggtcagcggattcggtaatcgcgtcaccaagtatgaacagcgcttttgcaactctgaatttggcgatctgaagcttagcgccggcgaggtcgcggtggtcacgacgctgctgctgcgcggtgctcaggcgccgggcgaactacgcagccgggcgcagcggatgtatgagttcagcgatatggcggaagtggaaagcgtgctggaagggctggcgacgcgcgaagatggccccttcgtcgcccggctgccccgggagccgggaaaacgggaaagccgctatatgcatctgttttgcgacgatatggacacgctgatcaccacagtggaagctctcgcgccgctggacgatgacggcgatctgcgcgccagggttgaagcgctggagggcgaggtggcggagctgaaagcgcgcctcgattcgctgttacaccatctgggagactaaaacgtggggacaagattgcgcattggggtggtcggcttaggcagcattgcgcagaaagcgtggctgccggtgctgggggcggcggaaagctggacgctgcaggcggcctggtcgccgggtaaagagaaggcgctgcggatctgcgaaacctggcggatgccatacgctgattccctcgatgccctggcggcacagtgcgatgcggtctttgtccatacctcgacggcttcacattatgaagtagtgaatcacttactgaatgccggggttcatgtttgtgtggataaaccattggcggacaagctgagtgaggcggagacgctggtcgagctggcggcgcgacgtcgactgacgttgatggtcggttttaatcgccgcttcgcgccgctctatcgggagctgaaggggcggctgggcgaggcggcctcgctgcggatggataagcatcgtagcgatagcgtcggcaacgatctgcgctttacgctgcttgatgactatctgcatgtggtggataccgcgctatggctggccgacggtcaggcacgtctgcgcggcggcgcgctgaagatcaccccgcagggcgaaatgctctatgccgaacatcagttcagttcgccccggctgcaggtcaccaccagcatgcatcgtcgcgcaggcagccagcgcgagtgggtgcaggcggtcacggatggcgggttatatgccgtcagcgagatgcgcgaatggcaggaggagtgcggtcatggcgtggtccagcgcccggttgccggctggcaaaccacccttgagcagcgcggctttgtcggctgcgcgcgccattttatcgaatgcgtgcaaaatcagacagttcctgaaactgcaggcgaacaggcgctgctggctcagcggatcgttgagaaactgtggcgcgacgccattagcgaataatccattgtaacaactgacagtagtaattcatgttgaacccggtagactatcgccactttccagcgcccgcatttgcgggcgttttactccagggtttggaataacagcgtaatgaaccttttaaaatcactggcggcagtcagttcgatgaccatgttttcgcgcgtgctgggctttgcccgcgatgcgattgtggcgcgtatttttggcgccgggatggcgaccgatgccttttttgtcgccttcaaactgcctaacctgctgcggcgtatttttgccgaaggcgccttctcacaggcgtttgtgccgatccttgccgaatataaaagcaagcagggcgaagatgccacccgcgtgtttgtctcatacgtctccgggctgctgaccctggccctggctatcgttaccgttatcgggatgctggcggcgccgtgggtaatcaccattactgcgcccggctttgccgataccgccgataagtttgcgctaaccacccagctgctgcgtattacctttccctatattttgctgatctccctggcttcgctggtgggggcgatcctcaatacctggaaccgcttctcggtgccggcctttgcgccgacgttcctcaacgtcagtatgattggttttgcgctgtttgccgcgccgtatttccatccgccggtgctggcgctggcctgggcggtgacggtcggcggcgtgctgcagctggcttaccagctgccgcatctgaagaagattggcatgctggtcctgccgcgaattaatctgaaagatgccggcgcgatgcgggtggtgaagcagatggggccggcgatccttggcgtgtcggtaagccagatctcccttattatcaataccattttcgcctcattcctcgtgtcgggctcggtgtcgtggatgtattatgccgaccgcctgatggagtttccctccggcgtgctgggcgtggcgctcggcactatcctgctgccatcgctgtcaaaaagcttcgccagcggtaaccatgacgagtattgccggctgatggactggggactgcgtctctgttttctgctggcgctgccgagcgcggtggcgctggggatcctcgccaaaccgctgaccgtggctctgttccagtacggcaaattcagcgcctttgacgcggcgatgacccagcgcgcgctggtggcctattccgtggggctgatgggccttatcgtggtgaaagtgctggcgccgggcttttattcccgtcaggacatcaagaccccggtcaagattgctattatcaccctgattatgactcaggtaatgaacctggcgtttatcggcccgctgaagcatgcgggtctgtcgctgtccatcggcctggcggcctgcctgaacgccgcgctgctctactggcagctgcgtaaacagaaaattttcaccccgcagccgggctggttggccttcctgctgcgtctgattattgcagtgctggttatggccgcggcgctgctgggcgtcatgcatctcatgcctgagtggtcgctggggacgatgccgttccgtctgatgcgtttgctggcggtggttatcgccggggtggtagcctatttcgccacgctgctggtgctgggcttccgcgtgaaagagtttgtccgtcgcacggcgtaagcggttgtgagggtagaaaaaccccgcttcgcctcaggcgaagcggggttttttatgatgcgctgcgttcggcagcgaggatgcgggcattctccagcaggcggatcgccagggctagcgcgccagtgatcactgccagcgtgaccactccgttccagccggccagcacgtacagcttactgcccagcaccgatcccagcgacatcccgataaacaccacggtgaatagcagggcgttgaggcggccgcgggcctgtggctcaaggccatataccaggttctgatgcgccaccaggcttgactgcaggccaaggtcaaagccaatcgccgacagggcaatcagcgccaactgagcgtgcactggcagcagcggcagcacaaacatcagggcaaaggagagggtgaccagcgccgcacccatctgtgtcaccttaccggcgccaaatttatcggccagaccgccggcaagcggcgcggccagcgccccggcggccccggcgataccgaaaccgcccgctactgcgctgcccatgtgatagtgttcggagagcatcaccgccagcgtcgaccagaaggcgctaaaggcgatggagagcgcgccctgagctagcgcggcgcggcgtaatgccgggtaacgctgccacagatgcgccatcgaggccatcagctgcggatagctcagcgtcgagtgcacagcgaagcgcggcaggacgcgccacattaccaggccaatcagcgcgacgctgaccgccgccgcctgatacatcacccgccagccgaatacggcgcccaccacgccgctgaccgtccgggagagcaggatccccagcagcagcccggtcatcacggtgcccaccatttttccctgcttgcccgccggggcgaggatcgccgccgccgggacgatatcctgcgccatggtcgccgccataccgatcagcagactgaccaccagcagtgagctgagctggccggtgaggctgcacaggagcagcaggagcgccagcagcgcgcttttcaccaggatcagccggcggcgatcgtggcggtcgccgagcgggagcaggaacagaatgccgagcgcataacccgcctgcgtcagggtagggaccagacccataccttctacagtcaggtggagattggcgcccatcaacggcagcagcggctgcgcgtagtaaatagaggcgacgctaaagccggcgccgagtgcgagaatgaagataatccagcctgcgtcgcgggtggaaagggaagtcggtgtcatgttcaatgcctcatagatgcgatggggctatttttccctgaacgcgactggcgcggtagccgggctggtggtaaaacggttatacgtagcacgtataggcaaaaggaaaatgaaaagacaagagcgtatagaccgcattgagctgatgcgcacctatatccgcatcgtagaggccggatcgctctccgccgccgcagggcagatggacactacccaggcgaccgtcagccgccgcctgcagtcccttgaagggctgctgggggttaagctgatcctgcgcaccacccatgcgatgaagctcactgacgatggcgaacgctgttatcgtcacgcccgtcaggtggtggacgcctggctggcgctggaggatgacctgcgtattgccgacgatcggccggtgggcgttctgcgagtgcgggcgccccacgcgtttggccagcagcagctgctggcgccgctggtggcatttctacagcgccatccgcagctgtcggtggagtggatgctaaacgataataccgtcgacttcctcagcgataatatcgactgcgctattcgcgtgggggcggaggtggatccagcaacggtatccgtactgctggcggaagtgccgcgctgcgtagtggcttctcctgagctgctggcgaagtatccgccgttaacctcgctggaggcgttatcgggcctgccatggatcgccattaataccttttatcagcatgaggtacggctcaggcatcaggcaagcgggcagattgtctctacagcgattactccctgtctgagcactgacagtctttacgtcgcgcgcaacaccgcgctggcggggctgggggtggcgatggtgtccagctggacggtcgtggaggatattgccgccggacggctgattgagctgttcccgcagtggcgacccgcctcgctgccggttcatctggtttatccctgggcgcgctattacccgacacgcctgcgtaagttcctcgacctgatgcgggagatcatgccggatctcgccgggatgcagcgtccgcaaagcgcataaaaaaaccggccaaaggccggtttttttattaagcacgcttactcgacgggctgtgggcgagtcggttcagcggtggctttatgggtcgcgctatgaccaccggcggcgcctttaccttcaaaggcgaacggcgggcgcacccaggtgctgtgacgcggtgcttccgggacatagtccggagctggcgcacgggtcattggcgcggtggcatggcgatgacccgccactacgaccggcttgctcaccgggggctcggctttgaccggttcggcaggggccgcttcgatcactggcgcttgctccacggtttctgcgaccggggcgatggtttcaactggcgctgcaacgacaggcgtcgtttccagcgcttcaggctctaccaccaccggctcggggtcgagcgtcactggcgcgatagcctgaggcgcttcgacagccggtgcttcggtgaccggctcctgaggcgctggctcgacggctgctggcgcgacaacttccgcagcatcaacgaccagcggctcggcggccgctaccggctcgacgactaccggctcagcggttactggttccatggtagccggctcgacggtgaccggcgcagcggtaacggtttcaacgacggcaaccggggccgctacggcctcgacagttttcgcgacgctggcgtcctgaacctgaacctcttccggctgctgatcctgcggacgaaccaccgggtagcggatccagactttaccggaagccatctccggcgatgcgcaggctacggtcagcggcataggcgactgggtcggatagcgttcgtcacgatagcgacgacgacgctgaccgctgacgcgcaggtgacgcggggagcgacgtgagcgacgcggcataccgttcgcttcacgggattcgccattttcgtcctggtccgcaacgctctccacccctgccggcagctcggctttcaccggctcgctgtgcggagcgataacttcagccactacggcttctggcacgatctcggcaactggctcgacgacagcggactcaacgcgcactttctgtgccagctggcgcggtttacgacgcggcagagtttgtacacgctcttcctgctccgtctcctgcacaaccggctcttcgcgagtctgcgctttggcttcctgctgcgcctgacgtttgtcgtcattgcggcggcgggtgcgttcgcggcgcggctgctgctcgtcacgggatttcgctttctccgcgtcgtcgcctgaggtttggcgaacatcacgggcttccacgttctgcgacggcttctcgcgacggttgcgacgattctcttcacgcgattcgcgcggttcacggccctcggcattgtccgcacgggtgtcgcgattgtcacggttatcgcggttgtcacgattgtcgcggttatcacggcggtcgttgcggtcgcggcggttgttggcgcgcggtttacgacgctcctgctgacgctccggtttttcttccgctttcttctcgatctgaacttcagccggtttggcctcttcggcgccagagaagatattcttcagcgcgctgaagaagcgtgagagcaggccaggctgcgccggtgcggcggccgcgaccggtgccgctgcggcgacaggcgcggcggcaggctcttcgagcatcggggctggcggcgcatctggcatgacaaaagcggccagggccggctgttccggacgtttccgctccgccggctcatcgtcgcctggcagcgccatctcttcttcatgcagcttcggcagcagatagctcagcgttgaggtttcttcacctttgcgcacgcgcaggacggagtagtgcggcgtttgcatttcgtcgtttggcacgataataacgcgcacatcgccctgacgggattcgatagcgctcactgcggcacgtttttcgttcagcagataggaggcgatcggtaccggaacaatggcgtggacttctttggtattctctttcagcgcttcttcttcgatcagacgcagaatagagagcgacagcgattcgttatcacgcacggtgccggtgccggagcagcgcgggcagacgtggtgactggactcgcccagcgacgggctcaggcgctgacgggacatctccagcaggccgaagcgcgaaatatggctgatctgaatgcgcgcccggtcctgacggacggcttcgcgcagacgattctccacggcgcgctggtggcgaaccggggtcatatcgatgaagtcgataacgatcaggccgccgaggtcgcgcagacgcagctggcgggcaatttcgtcagccgcttcgaggttggtattgaaggctgtctcttcgatatcgccgccgcgggtggcgcgggcggagttgatatcgatcgcggtcagcgcttcggtgctatcgataacgatagacccgccggaaggcaggcgcacttcgcgctggaaggcggactcaatttgcgattcgatctgataatggctgaacagcgggatttcaccggtgtacagtttgattttgctgctgaaatccggacgacccagcgcggcgatatgctggcgcgccagctcaagcactttcgggttatcgatcaggatttcgccgatgtcctggcgcaggtagtcacggaaggcgcggacaatgacgttgctttcctggtggatcaggaacggcgccggacggctttccgcggctttctgaatcgcttcccagtgcttcaggcggaagctcaggtcccactgcagggcttcggcggatttgccgacgccagcggtgcgaacgatcaggcccatgccgtccggaagctccaggctcgccagcgcttctttcagttcggtacggtcgtcgccctcgatacggcgggaaattcccccggcgcgcgggttgttcggcatcagtaccagatagctgcccgccaggctgataaaggtggtgagcgcagcgcctttgttgccgcgttcttctttatcaatctgcacgataacttcctgaccttcccgcagtacgtctttgatattaggacgaccatgcgcattgtagttggcggggaagtattcgcgggcgatttctttgagggggaggaaaccatgacgctcggcgccgtaatcaacaaacgcggcttcaaggctgggttcaatgcgggtgattttgcctttgtagatgttcgcttttttctgttcgtgcccggggctttcgatatccaggtcgtacaggcgctgcccatcaacaagggcgacgcgcaactcttcctgctgagttgcgttgattaacattcttttcatcgtaacttactcattattcttacattgacgactaagctgcgggcagagtaatgcctttccgggggaaaaccgatggcctcgtgtctggttcacgtcgccaacctcacggttgtcgcgcgcttaagaggcgcagagtgtcggtcgcctatgtttcaaacggaaacacagcgcaattattcaggggaacagcctgggatgtatcaccagagaatattccatttatactcgtcgtctttcgcgttgcaggcatggtggcttaacctgctcacctcgatctggcgatccagatgagctcccgggagtcccggagttgacgccttcctgcgacttgaaatccatagagcctgtaccggtaaggactgcaacccgcagcccgctaactgtctgaaagatcacaacgtcttacgccattgctgcgtgggcgatcggtcagacaaaattggtcattccgctaatgtcttgttctaacaagatgcaatacggaaaacggtctcattattccattgctaaccttgttatagcaagttgactttcaccttttatcacccggttactcacagttttatcacctgcccatacagattgttctaataacaaacaaaatggcggtcaggtaaaccgtgaaaacaggataatgataaatataagcatataaaaatgagtggcgctaatgcgtccggctatttagaatcgcgcaccatgaaaactgagaccccaaccgtaaaaatggttgccattgctgctgatgaagcggggcaacgtatcgacaactttttgcgtacgcaattgaaaggcgtaccgaaaagcatgatttatcgcatcctgcgtaaaggcgaggtgcgggtaaacaaaaagcgcgtgaagccggagtataagctggaagcgggcgatgaagtccgtatcccgccggtgcgcgtggcggagcgtgaagaagaggcggtatcgccgcacctgcagaaagtggccgcgctctctgaggtgatcctctatgaagacgatcatattctggtgctcaataagccttctggtaccgcggtacacggcggcagcggcctaagcttcggcgtgattgaagggctgcgcgccctgcgcccggaggcgcgcttccttgagctggtgcatcgtctcgaccgggatacctccggcgtgctgctggtggcgaaaaagcgctcagcgctgcgttcgctgcacgagcaactgcgcgataaaggcatgcagaaagattatctggcgctggtgcgcggccagtggcagtcgcataccaaagtggtccaggccccgctgttgaagaatattctgcagagcggggagcgcatcgttcgcgtgagtcaggaaggcaagccgtcggagacgcgttttaaagtggaagagcgttacgaattcgccacgctggtgcgctgcagcccggtcaccggccgcacgcatcagatccgcgttcatacccagtatgccggccatcctatcgcttttgacgaccgctatggcgaccgcgagttcgacaagcagctgtccgctaccggcttaaaccgcctgttcctgcacgcggcggcgctgaagtttacccacccggggagcggggaggtgatgcgcgttgaggcgccgctggacaaccagctgaagcactgtttacaggtgctacggaagagcaaataagcgcaacggcggaatcagttccgccgttttttttgcctcagcctaacagcgggttgtagttttcacggcgcaacatctgacagagcgcgattaagggtaaaccgaccagggtgttcgggtcgcggccttccagccgttcgaacagcgtaatgcctaatccttcgctcttgaaactcccggcgcactgcagcgggttctctttgcgcacatagccttctatctctttatcactgagatggcgaaagtgaacgtcaaagggttcgcattcggtttgcagatggccgctggcagagttgtacagcgccagtccggtataaaaggtaatgattgacccgctggcctttcttaactgcctgcgggcattttcctcggtgtgcggtttgccggtgatttcaccgtccagtacgcaaacctgatcggagcctataataaggtgattagggaagcgtgtggccagactttgcgctttggcctgcgccagtcgggtgacaagctgacgtgcggattcatcaggccggggcgtttcgtcgacgtcaggcgcggcacattcaaacggtaaacccagtttttccagcagcatgcgccgccagggagaggttgacgcgaggataagatcagacatattttttcatccacatatagcgcttcgcagagcatcatcttaaactatgcgccgcaatgtgtgcgaataaatggcaaaaggcaacctgaggctgcctttttctttgactctatgacattacaaagttaatatgcgcgccctatgcaaaaggtaaaattacccctgactcttgatccggtacgcacggctcaaaaacgccttgattacgaaggcatctatgcccgcgatcaggttgaacgtgtaaccgattctgtagtcagcgtggacagcgatgtggaatgcagcatgtcgttcgctatcgataaccagcgtctcgccgttattactggcgatgcaaaggtaacggtaactctcgaatgccagcgttgcgggaaaccgttctcccatcacgtccacaccacgtattgttttagccccgtcagaaatgacgaacaggccgaagcactaccggaagcgtatgagccgattgaggttaacgaattcggtgaaatcgacctgcaggcaatggtcgaggatgaaattatcctctccctgcccgtagttccggtgcatgattctgaacactgtgaagtgtccgacgcggacatggtctttggcgaactgcctgaagaggcacaaaaaccaaacccatttgccgtattagccagcttaaagcgtaagtaattgaggagtaaggtccatggccgtacaacagaataaaccaacccgttccaaacgtggcatgcgtcgttcccatgacgcgctgaccgcagtcaccagcctgtctgtagacaaaacttctggtgagaaacacctgcgtcaccacatcactgccgacggtttctaccgcggtcgcaaggttatcgctaagtaatcacgcgatactcgcaggatttcccgttgcaggccaaggcgggcgtttgcgtccctggaaactcggttaacccggtcgctgggggcatttatgcccggattgttgcgtctgcagcgtgaatattcgcgggtgccagcgtgatgaagcttagtgaggactccccgggcaactggggaatcaccgaaccgggcagcgacgataccttgacacgtctaaccctggcgttagatgtcatggggggcgatttcggcccatccgtgacggtgcctgcagcactgcaggcactgaactctaattcgcaactcacacttcttttagtcggcgatcccgacgccatcacgccattactcgccaaagctgatttcgaacaacgttcgcgtctgcagatcattcctgcgcagtcagttattgccagtgatgcgcgacccgcacaggctatccgcagcagtcgcggaagctcaatgcgcgtggcgctggagcttgtgaaagaagggcgggcgcaagcctgcgtcagcgctggcaacaccggcgcgctgatgggtctggcgaaactgctgctcaaaccgatcgaaggtattgagcggccggcgctggtgacggttttaccgcaccagcagaagggcaaaaccgtggtgctggatctcggcgccaacgtcgattgcgacagcacgatgctggtgcagttcgcggtaatgggcgcggtgctggcggaagaagtggtcggcattgccaacccccgcgtcgctttgttgaacatcggcgaagaagagatgaaaggcctcggcagcatccgcgatgctgccgcagtgctcaaaacgctgccttccctcaactacatcggctatcttgaagccaatgaactgttgaccggaaaaaccgatgtgctggtttgtgatggattcacgggcaacgtcacattaaaaaccatggaaggtgttgtcagaatgttcctttcactgctgaaatctcagggagagggcaaaaaacggtcgtggtggctgctgttactaaaacgttggttacaaaaaagcctggcgaggcgattcagtcacctcaaccccgaccagtataatggcgcctgtctgttaggattgcgcggttccgtgatcaagagtcatggtgctgccaatcaacgcgcctttagcgtcgcgatagagcaggcagtgcaggcggtgcagcggcagatccctcagcggatcgccgcgcgcctggaatctttatacccagctggtttcgagctgccggaaagcgacagtgacgtgaacgcccgacagcaaagcgggacgaatggccacgattgacgccgcggcggttgaacgaggcgggtatatcacccaagagtgactgagcgtacatgtatacgaagattattggtaccggcagctatctgcccgagcaagtgcgtacaaacgccgacctggaaaaaatggtagaaacctctgacgagtggattgtcacccgcacaggtatccgtgagcgtcgtattgccgcagcgcatgaaacagttgctacgatgggctttgaagccgcaaagcaggcgctggcgatggcgggcgtgtccgcggagcaaattggtctgattatcgttgcgaccacctccggcacgcacgcgtttccgagttctgcatgccagatccagtcaatgctgggcgttaagggttgcccggcgtttgatgtcgccgccgcctgcgccggtttcacctatgcgctaagcgtcgccgatcagtatgtgaagaacggcgcggtagattatgcgctggttgttggcgccgatgtgctggcgcgcacctgcgatccggcggatcgcggaacgattattattttcggcgacggcgccggcgcggttgtactgggcgcctccgaagagccgggcattatctcgacgcatctgcatgccgacggcagctatggcgaactgctgaccctgccgaacgccgatcgcgtcgatccggaaaacccgatctatctgacgatggccggcaacgaagtcttcaaagtggcggtcaccgagctggcgcacatcgttgatgagacgctggcagcgaataatcttgaacgttcagcgctggactggctggtgccgcatcaggctaacctgcgtattatcagcgcgacggcgaagaaactgggtatgtcgatggataacgtcgttgtgaccctcgaccgccatggcaacacctccgcggcgtcagtcccttgcgcgctggatgaggccgtccgcgatggccgtattcagcgcggtcagctgattttgctggaagcctttggtggcggtttcacctggggttccgcgctggttcgtttttagtataaggatttaaacatgacgcaattcgcatttgtgttcccggggcagggctctcaggccgtaggcatgctggccgaaatggctgccgcctggccggtcattgaagagaccttcggtgaagcttccgcagcgttgggttacgatctgtgggcgctgacgcaacagggcccggcagaagaactgaataagacctggcagactcaaccggcgctgctcgccgcctccgtggcgctgtaccgcgtctggcaacagcagggcggcaaagcgccagcgctgctggcgggtcacagcctcggcgaatactccgcgctggtatgcgcgggcgttatcggtttcgctgatgccgttcgcctggttgagctgcgtggtaaattcatgcaggaagccgtaccggaaggtaccggcgccatgtccgcgattatcggtctggacgacgccgctatcgccaaagcctgtgaagagtctgccgaagggcaggtggtctctccggtgaactacaattctccgggccaggtggttatcgccgggcacaaagaggccgttgaacgcgctggcgccgcctgtaaagccgccggcgccaaacgcgcgctgccgctgccggtgagcgtgccgtcccactgcgcgctgatgaagccagccgcagaaaaactggcggtagagctgcagaaaatcaccttcaacgcgccgacgattccggtggtgaataacgtcgacgtgaagtgcgaaaccgcgccggacgccattcgcgacgcgctggtgcgccagctgtacagcccggtgcagtggaccaaaaccgttgagtttatggctgccgagggcgtatcgcatctgtatgaggttggcccgggtaaagtcctcaccggcctgaccaaacgtattgttgacaccctgaccgcttccgcgcttaacgagccggcggcgatgtctgcggcgcttgagcaataaaagaggaaaaccatgagttttgaaggaaaaatcgcgctggttaccggtgcaagccgcggtattggccgtgctatcgctgaaacgctcgtcgcccgtggcgcgaaagttatcggtactgcgaccagcgaaagcggcgcgcaggcgatcagcgactatttaggcgccaatggtaaaggtctgatgttgaatgtgaccgacccggcatctattgaatctgttctggaaaatgtgcgcgcagagtttggcgaagtggatatcctggtgaataatgccgggatcactcgcgacaatctgttaatgcgcatgaaagatgacgagtggaacgatattatcgaaaccaacctgtcatcggttttccgtctgtcaaaagcggtaatgcgcgctatgatgaaaaagcgtcatggacgtattatcactatcggttctgtggttggtaccatgggaaatgcgggtcaggccaactacgccgcggcgaaagcgggtctgatcggcttcagtaaatcactggcgcgtgaagttgcgtcccgcggtattactgtaaacgttgttgctccgggctttattgaaacggacatgacgcgtgcgctgaccgatgagcagcgtgcgggtacgctggcggcagttcctgcggggcgccttggcaccccaaatgaaatcgccagcgcggttgcatttttagcctctgacgaagcaagttacatcactggtgaaacgctgcacgtcaacggcggaatgtacatggtctgaccgagatttgtgcaaaacgttcaggaaccgcgcacttcgcacggttctctgtgcggttttgtgcgaaaagatttgcgttcttagggcaaacggcctcaaaatagcgcaaaatcgtggtaagacctgccgggatttagttgcaaatttttcaacattttatacactacgaaaaccatcgcgaaagcgagttttgataggaaatttaagagtatgagcactatcgaagaacgcgttaagaaaattatcggcgagcagctgggcgttaagcaggaagaagttaccaacaatgcttccttcgttgaagacctgggcgctgattctcttgacaccgttgagctggtaatggctctggaagaagagtttgatactgagattccggacgaagaagctgagaaaatcaccaccgttcaggctgccattgattacatcaacggccaccaggcgtaagtgaacatctccaggcggtcattcgaccgcctgagttttatcttttttttgtcccacaagaatctattttccctccctggaggacaaacgtgtctaagcgtcgtgtagttgtgaccggactgggcatgttgtctcctgtcggcaataccgtagagtctacctggaaagctctccttgccggtcagagtggcatcagcctgatcgaccatttcgatactagcgcctatgcaacgaaatttgctggcttagtaaaggattttaactgtgatgacattatctcgcgcaaagaacagcgcaagatggatgccttcattcaatatggaattgtcgctggcgttcaggccatgcaggattctggccttgaagtgacggaagagaatgcaacccgtattggcgccgctatcggctccggtatcggcggtctcggcttgatcgaagaaaaccacagttcgctggttaacggcggaccgcgcaagatcagcccattcttcgttccttccacaattgttaacatggtggccggacatctgaccatcatgtttggtctgcgtgggccaagtatctctatcgcgaccgcgtgtacttcaggcgtgcacaacatcggccaggccgcgcgcatcatcgcctatggcgatgccgatgcgatggtggcaggcggcgcggaaaaagccagtaccccgcttggcgtgggcggcttcggcgcggcgcgtgcgctctccacgcgcaatgacaacccgcaggcggcgagccgtccgtgggataaagatcgtgacggcttcgtgctgggcgacggcgcgggtatggtggtgctggaagagtacgagcatgccaaaaaacgcggcgccaaaatctacgccgagatcgttggcttcggcatgagcagcgatgcttaccacatgacgtcaccgccggaagatggcgcgggcgccgcgctggcaatggtgaatgctattcgcgatgcgggcatcgaaccgggccagatcggctacgtcaacgcccacggcacctcgacgccggccggcgataaagcggaagcgcaggcggttaagtctgtcttcggtgatgcggcgagccgcgtactggtgagctctaccaaatccatgaccgggcatctgctgggtgcggcaggggcggtagagtcgatttactctatcctggcgctgcgcgatcaggcggttccgccgacgatcaacctcgacaacccggatgaaggctgcgacctcgacttcgttccacacgaagcgcgtcaggtttccggtatggagtacaccctgtgcaactccttcggctttggcggcactaacggttcgctgatcttcaaaaaagtgtgacagggcttgccccggtactgctttaacaaaaggcccgttcgtcgggccttttttattcagctttctccgcttgttctctgctctgggtcctgacacactgaccgaccagtgaaaaggagtcctttatgttcttgataaacggcgttgtacaggacacgttggcagcgaacgatcgcgccacccagtttggcgacggctgttttaccaccgcccgcatccagcaagggcaggttgcgctactggacgcccatctgcagcgtttacagacaacctgtgaaaaattacatatcccatttaacgactggctgacgctgagcgaagagatgcagcgtctggctcggccgcacgcgcagggcgtgctcaaggtgactctcacccgcggcgttgggggaaggggatacagtacggcaggctgcgtgtcgcccactcgcattctcagcttctctccattcccggcgcattatgcgcgctggcgggaggagggcattactctgacccagagtccggtgcccctggggcgcaactcctggcttgccggcctgaagcaccttaatcgccttgagcaggtgctgatccgctctcatcttgagcagacggacgccgatgaggcgctggtccttgacagtgacgggtggcttacggaatgctgtgccgcgaatttattctggcgtcagggacgtgatgtatttactccgcgactcgattatgccggggttaacggcattatgcggcagcgctgtatcgcgcagctggcaccatcgacgtttcgcgttgtcgaagtgacagcgcgtcccgagacgttgcgggaggccgatgaagtgctgatctgcaatgcgctgatgccgctggtgccggttcgccgctgggaggagaccacctggtcctcgcgtgagctttaccattttttagcccctttgtgtgagctgtctggttagtatgaagaaaatgttacgttttatcctgttgctggtcgtgctgttgggcatcgccgcggcggcaggcatgtggaaggtacgccagctggcggacagcaagctgctgattaaggaagagaccatctttaccctcgaagccggcaccggccggctggcgctgggccaggatctctatcgcgagaaggtgatcaatcgcccgcgcgttttccagtggctgctgcgggtggaacctgagctgtctcacttcaaggccgggacctatcgcttcacgccgcaaatgacggtgcgcgagatgttgcagctgctggccagcggcaaagaggcgcagtttccgctgcgctttgtcgaaggcatgcgcgtcagcgactacctgcgccagctgcgcgatgccccgtacgtgaagcacacgcttgaagacgatagctacgcgacggtggctaaggcattaggtcttgagcatgccgactgggtagagggctggttctggccggatacctggatgtacaccgccaacaccagcgatatcgccatcctcaagcgcgcgcatcagaaaatggtcgccgaagtggcgaaggtctgggaaggacggatggagaatctgccctatgccgatcagaaccagctgttgaccatggcctcgattattgaaaaagagaccgcggtggcggaagagcgcgaccgcgtcgcgtcggtatttatcaaccgcctgcgcatcggtatgcgcttgcagaccgatccgaccgtaatctacgggatgggcgcaggatatactggtaagttaacgcgtaaggatctcgagacgccgaccgcatacaatacttataccatcagcggtttgccgccgggccctatcgcggtgccgggcgaggcctcgctgaaggcggccgcccatccggcgaaaacgccatatctttatttcgtcgccgacgggaaggggggccatacgtttaccacaaacctggtcagtcataaccgtgcggtgcaggattatctgaaagtacttaaggaaaaaaatgcgcagtaactatatcgtcatcgaggggctggagggcgccgggaagaccaccgcacgtcaactggtggtggagacgctgcagtcggcgggtattcacgatatggtgtttacccgcgagccggggggcacaatccttgccgaaaaactgcgtagcctggtgctggatatccagtccacgggcgatgaagtcattaacgataaagcggaagtgctgatgttttacgcggcgcgcgtccagttggtggagaccgtgattaagcccgcgctggcccgcggccagtgggtgatcggcgatcgtcacgatctgtcgacgcaggcctatcagggcggcggccggggaattgaccgcacgatgctggcgacgctgcgcgacgcggtactcggtgattttcgccccaatctgacgctgtatctcgacgtcacgccggaagtggggctgcagcgcgcccgggcccgcggcgagctggatcgcattgagcaggagtccatgaactttttcaaccgtacccgcgcgcgctatcttgagctggccgccgccgatccttctatccgcacggttgacgcaactcagccgctggatgccgtggcgcgcgacattcgcgccacgatcgcccagtggatggcggagcaagcggcatgaaatggtatccgtggctgcgcccctcgttcgagcaactggtcggtagctatcaggccggacgaggccaccacgccttactgttacagtccctgaacgggatgggcggcgaggcgttgatttacgcgctgtgccgcttcctgatgtgccgccagcccgaaggacataaaagctgcggccactgccatagctgtcagctgatgcaggccggcacgcaccccgattactatgcgctcagccccgagaagggcaagagcgcgctgggtattgacgcggtgcgcgatgtcaatgaaaagctctatgaacatgcgcgccttggtggggcaaaagtggtctggattagcgatgctgccttgctgaccgatgccgccgccaacgcgttgctgaaaacgctggaggagcccccggagaatacctggttcttcctcgcctgcgaggagccggcgcgtctgctgaccactctgcgcagccgctgtcgcctgcatcatctggcgccgccgtctgagccttatgctctggcctggctggagcgtgaggtgagcctgccgcaggagtcattgttgaccgcgttacgcctgtgcgccagcgcgccggctgcggcgctcgaactgttacaggaaccgctgtggacggcgcggcagcagttgtgtcaggcgctggcggctaccctggcgagcggtgactggctggcgctgctgccgatactcaatcatgaacaggcggcagttcgcctgcactggctggcgtcgctgctggtcgatgcgcaaaaacgacagcaggggattaccctggtgagtaaccctgacgtctggccgctgctggagcagctggcgcacagcctgcccgccgcccggctgcaggcgattgcccatgacgtctgtacctgccgcgagcaattgctcaacgttgtcggtgtcaaccgcgaactgctgcttaccgagcgcctgctgcgctgggaacattacctgcaacccgggacgggtttacccgtctcccacctctgagtgagacattatgtttttagtcgactcccactgccatcttgatggtctggattatcaaactctacacaaaaacgtcgacgacgtgctggcaaaagcggccgcacgcgatgtgaaatattgcctcgccgtcgccacgacgctgcctggctaccgcagtatgcgcgaactggtggggacgcgtgacaacgtcgtcttctcctgtggcgtacacccattaaaccaggacgagccctgggaggtagagaccctgcgcgcgctggcagcggaagagggcgtcgtggcgatgggggagaccggtctggattatttttataccccggaaactaaagcccaacagcaaagctcgttccgcgaccacattcgtatcggccgtgagctcaataagccggtgatcgtccatacccgtgacgcgcgtgccgatactctggctattttgcgcgaagaaaaggtgacggattgcggtggcgtactacactgtttcactgaggacagggagacagcgggcaagctgctcgatatggggttctatatctcgttttccggtatcgtcacttttcgtaacgccgagcagctgcgtgatgcggcgcgctacgtgccgctggatcgcctgctggttgaaaccgattcgccgtacctggcgccggtcccccaccgcggcaaagagaaccagccggcgctggtccgtgacgttgccgagtatatggcggtactgaagggggtgtcgcttgagcatctggctcagcagaccaccgacaattttgccaccctgttccacatcgaccccgcccgtttgcaacctgcttgatctgcttattattttaaggctcgtaattaatagccaaagcgagtaaagttcaccgccacaaaagtggcggtgaaggttttttagcaacatctggatacaatttatgtaagttgatgtaaatttttaccggaaggctgattgaaacgtgatagccgtcaaacaatcatcccgttaattattttactctgtgtaataaataaagggcgcttagatgtcctgtccacggcacggttctccccccgggccaatgcgtgaaagcgtaaaaaagtaccaaatactcaggagcactctcaattatgtttaagaatgcatttgctaacctgcagaaggtcggtaaatcgctgatgctgccggtatccgtactgcctatcgcaggtatcctgctgggcgtcggttccgctaacttcagctggctgccagccgtggtctcccacgttatggcagaagcaggcggttcagttttcgccaatatgccgctgatcttcgctatcggtgtggccctcggcttcaccaataacgacggtgtatccgcactggctgcagtcgtggcttacggcatcatggtgaaaaccatggcggttgttgcgccgctggtgctgcatttacctgctgacgagattgcggcaaaacaccttgctgataccggcgtgcttggcggtattatctccggtgctatcgccgcctacatgttcaaccgcttctatcgcatcaagctgccagaatatctcggcttctttgcgggcaagcgttttgtgccgattatctctggtctggccgctatcttcaccggcgtgatcctctccttcatttggccgccgatcggctccgcgatccaaaccttctcccagtgggctgcttatcagaacccagtggtggcgtttggtatctacggtttcatcgaacgttgcctggtgccgtttggtctgcatcacatctggaacgttcctttccagatgcagatcggcgaatacaccaacgcggctggtcaggtgttccacggcgatatcccgcgctacatggcaggcgacccgacggcgggcaaactgtctggcggcttcctgttcaaaatgtatggtctgccggcagcggctatcgcgatttggcactctgctaaaccggaaaaccgcgccaaagtgggcggtatcatgatctccgccgcgctgacctcgttcctgaccggtatcaccgagccgatcgagttctcgttcatgttcgtggcgccgatcctgtacgttatccatgccattctggcgggcctggcgttcccgatctgtatcctgctgggtatgcgtgacggtacctcgttctctcacggcctgatcgactttatcgtgctgtccggtaacagcagcaaactgtggctgttcccgattgttggtatctgctatgcgatcgtgtactacgtcattttccgtgtgctgattaaagccctggatctgaaaacaccgggtcgtgaagacaccaccgaagagagcaaagctggcgccaccagcgagatggctccggctctggtcgccgctttcggcggtaaagagaacatcaccaacctcgacgcatgtattactcgtctgcgtgttagcgtggcggatgtagcgaaagttgaccaggctggcctgaaaaaactgggcgccgctggcgtggtagtggcaggttctggcgtacaggccatcttcggtaccaagtccgataacctgaaaactgaaatggatgagtacatccgtaacagttaagacgtagtatcggggagactaaggcagccaactggctgccttttttatgcgctaaagtcggtgccccacaagcgataaccctgaaaacagtccgccatatgcttattccctcagcagctaagtctatagttgaataagaaaaggagctttcaggttgaaagagagggagaatgtcgctcatactcttagcggaacctgtgcgtccgcgtttatctgcagaagcaggccagcgcacgggataaaacttataaggaatcagtcatggcagaagaaacgattttcagcaaaatcattcgccgggagatcccgtcggatattgtctatcaggatgagcttgtgaccgcttttcgcgacatctccccgcaggcgcccacccatattctgattgtcccgaatgttctgattcctaccgtaaatgacgtcaccgctgaacatgagctggcgctgggccggatgatgaccgtcgcggcgaagatcgcccgcgatgaaggtcttgccgacgatggctatcggttgatcgtcaactgcaaccgccacggcggccaggaagtgtaccatatccatatgcatctgctgggcggtcgtccgcttggcccgatgctggcgcacaaaggctaacgtcatgctcaggacccttttgggcgcgtgtctggcggcggggctactcgccgggtgtagttcacacccggagatcccggtttctgaccagcaggcgctggtgatggagtcgagcgtgctggcggcggggatcagcgccagcgagcctgccgtcgtggcgacagagattcaggctaccgcctcctcaacgctatataacgagcgccagcagccggttaccgtgcactatcgttttttctggtatgacgcccgagggctggagatgcatccgctggacgcgccgcgcaccatcgtggtaccggcccgctcctcggtcacgttatatggcagcgccaatatcctgggggcgcataaggcccgcctttatctttatctgtaaggggtaattataatgatgaaaatgtgtcgctatgcgttaatcacagcactggcgatattcctcgcaggctgtgcggggttgcgggagcagcccgcgccggtagaagaggccaaaccgcagccgcagcagcctgcgcagccgcagcccacggtgccgaccgtaccggcggtgccctctgtcccggcgcagcctgggccgattgagcatcaggatcagcagtcgggtcagccggcgccgcgcgtgcgtcattatgactggaacggcgcggttcagccgctggtggggcagatgctgcaggcgagtggggtcaatgccggcagtattctgctggttgacagcgtgaacaaccgcaccaacggttcgctgaatgctggagaagccaccactgcgctacgtagtgcgctggccggtaacggcaaatttaccctggtatcggcgcagcagctggcggtcgccaagcagcagctgggcctgtcgccgcaggacagcctcggcagccgcagcaaagccatgggcatcgcccgcaacgtgggcgcgcagtatgtgctttactccaatgccaccggcaacgtcaacgcgcctgagctgaaaatgcagctcatgctggtgcaaaccggtgagataatctggtcaggtaaaggtgctgttcagcaacaataagctaacgcgcgacgagctcttgtcgcgcttctttccccattatcatcctgtcgcctcgctgagccagagtggcctcagcggcggcagtgtgattatcagcgacggcgaccggcggcacgtgctgcgtcagccgcacgatccgtctgccgccacttaccattttcgccgtcagtatcacgcactccgccgactgcctgccaggctggcgccaaccccgctgttttactcaccctgctggatggtggtggagtattgcacaggggaggtgaaaagcgagttaccggcctccccgcagctgtcaggcttattgtatgatttgcatcagcaaccgcggtttggctggcgggttagcctcacaccactgctggcccagtactggcagaggtgcgatccggcgcggcgcaagccgcggtggctgcgctggcatcagcggctgcgccgccagggcgagccccgtcccctgcggctggcgccgctgcacatggacgtccatgccggcaatattattcataatgagtccggcctgaggctgatcgactgggaatatgccggcgatggcgatatcgcgctggagctggccgcggtgtggatcacgcctggcgagcgccgtcggctggtagaagcgtatgcccggcgggcggccatcgacgcgcagctgctttggcggcaggttgcactctggcgcccgtgggtactgctgctgatggcgggctggtatgaaatgcgctggcggcagagcggggaccggcaatttatcacgctggcagatgaaatatggtgtcagttagacaacgaacgtaaaggataagagaggtcagtgtgggcccagtgatgttggatgtcgaagggtatgagctggatgcggaagagcgagagattctggcgcatccgctggtgggagggttgatcctctttacccgaaattatcacgatccggcgcagctgcgcgagctggtgcgccagatccgcgacgcctcccggaaccatctggtggtggcggtcgatcaggaaggggggcgggttcagcgtttccgcgaagggtttacccgtttaccggcggcccagtctttcgccgcgctgttggggatggaagaggggggcaaactggccgccgaagccggctggctgatggccagcgaaatgatcgccatggatatcgatattagttttgcgccagtgctggacgtcggccatatcagcgccgcaatcggcgaacgttcttatcatgaagatccgcagaaagcgctgacgatggcgcgtcacttcattgacgggatgcacgccgcgggcatgaaaaccaccggcaaacacttcccgggacacggggcggtgactgccgattcgcacaaagagacgccgttcgatccgcgggcggcatcggttatccgcgaccatgatatggcggtgttcaaaagccttatcgccgagcagcgtctggacgccattatgccggcgcatgtgatttacccggagctcgatccgcgtccggccagcggctcggcgtactggctgaaaacggtgctgcgcggcgaactgggctttgacggggtgattttctccgacgatctgtcgatggaaggggcggcgatcatgggcagctatgccgaacgcggtcaggcatcgctcgacgccggttgcgatatgatcctcgtctgcaataatcgtaaaggcgcggtcagtgtgctggataacctgtcgccgatcaaagcagagcgtgttacgaaattgtatcataaaggttccttttcccgtcaggagttaagggattcagcccgttggaaaacggtgagtgcccagctggagcagcttcatgcgcactggcaagaggcgaagtccgcgtaacgctctacggggcgttgttgtctggtgaggatgcgatgattatctatttacacggttttgactcgaacagccccggtaaccatgagaaggtgatgcagctgcagtttatcgacccggacgtgcggttgattagctacagcacgcggcatcccaagcacgatatgcagcatttgctgaaagaggtcgataaaatgctgcagctcactgccgatgaccggccgctgatctgcggcgtcggccttggcggctactgggcggagcggattggttttctgtgcgatatccgccaggcggtgttcaatccaaacctgtttccgcatgagaacatggaaggcaaaatcgaccgaccggaagagtatgccgacatcgccaccaagtgcgtgaccaacttccgcgagaagaaccgcgatcgctgcctggtggtgctttcccgccaggacgaggcgttggacagccagcgttccgccgatctcctgcaccactattatgaaattatctgggatgaagagcagacccataagtttaaaaatatctcgccgcatctgcagcggctgaaagcgtttaaaaccctcggctaactgcttttcccttgttcccaaacccgcgtcgggttcaccacgcgggttttttcatgtctacacttattggtttcgctgaaaaaatacgcgacaaaacttgatgcacatcaattttggtatgaccaatgcaccgttcatggtattctcgacagtgctgaatggtttcattaacgtaacttgttgttaaataaaggctatttcaataacttttatttaacaattggttaataattttaggggtacacatgactacgccattgaaaaaaatcgtaattgtgggtggcggcgctggcggactggaactggcaactcagctggggagaaagttagggcgccataagaaagcgaaaatcaccctggtggaccgtaaccacagccatctgtggaagccgctgctgcacgaagtggccaccggttctctggatgaaggcgttgatgcgctgagctatctggcccatgcccgcaaccacggtttccagttccagctgggctcggtggttgatatcaaccgcgaagggaaaaccatcaccctcggcgagctgcgcaatgaaaaaggcgagctgctggtggctgagcgtaaactgccgtacgacacgctggtcatggcgttgggcagtacctcgaatgactttaatacccctggcgtaaaagagaactgcattttcctcgacaacccgcaccaggcgcgtcgcttccatcaggaaatgctcaacctgttccttaaatactctgctaacctcggcgctaacggtaaagtaaatatcgccatcgtcggcggcggcgccaccggcgtggagctctccgctgagttgcacaatgcggtgaaacagctgcacagctacggctacaaagggttgaccaacgaagcgctgaacgtcacgctggtcgaggcgggcgagcgcattctgcctgcgctgccgccgcgcatttccggggcagcgcataatgagctgactaagctgggcgtacgggttctgacgcagaccatggtcaccagcgcggatgcgggcggcctgcacactaaagatggcgaatatattgaggcggatctaatggtctgggcggcggggatcaaagcgccagatttcatgaaagagatcggcggcctcgaaaccaaccgtatcaatcagctggtggtcgagccgacgctgcagactacccgcgatgcggatattttcgccatcggcgactgcgcctcctgcgcccgtccggaaggcggctttgtgcctccgcgggcccaggcggcgcaccagatggctacctgcgcgctgaacaacatcctggcgcagatgaaaggcaaaccgctgaaggcatacacctataaagaccatggctcgctggtgtcgctgtcaaattactccaccgtcggcagcctgatgggtaacctgatgcgcggttcgatgatggtggaagggcgcattgcgcgcttcgtgtacatctccctgtaccgtatgcaccagattgctctgcatggttacttcaagaccggcctgatgatgctggtcgggcgcatcaaccgcatcattcgcccgcgcctgaagctgcactaatcgctgtcgcgacccggaggcgcgctctgagggcgcctccgggctcttctgctggaaccgcagagatcccgctcggaatcctctgaatccctttgatttgcagcgaattctcgcacttttcatccgctatctgatttgcgccctcccggctccggttgcaaaattgtatcaacagcaacaaaggaggaactcccgtgaataaatctatgttggcgggtatagggataggcgtggctgccgcgctgggcgttgcagctgtcgctggtctcaacgtgttggatcgcggcccgcagtatgcgcaagtggtctccagtacaccgattaaagaaaccgtgaaaacgccgcgtcaggaatgccgcaatgtcacggtgactcatcgtcgtccggtacaggatgaaaaccgcatcgccggttcggtgctgggcgcggtggcgggcggggtgattggccaccagtttggcggcggtcacggacgcagcgtggcgacggttgtaggtgcgctgggcggcggctatgcaggcaaccagatccagggcgcgatgcaggacaacgatacctacaccaccacccagcagcgctgcaaaacggtgtatgataaatccgataaaatgctcggctacgatgtgacctataagataggcgatcagcaggggaaaatccgcatggatcacgatcccggcagccagatcccgctggacaacaacggccagctggtcctgaacaataaaatctaaaaacagatttgtgtagtgattagcccctcaatcgctcaggctgaggggctttttttatcagaaggttaaggcatagttcagaccaaaggtgcggccacgacctttgtactcatacagcgatgaactgccgtaggttgggctgtagagcagcggcgcgcgctggccccagatagtgacatagtcttcgttaagcaggttttcgatactgaaggtcagtttccccaccggcagcgcgtaactaccgataaaatcgacggtgttatagccttccagcttgttaccggcggcatcgctgaggtcaaatacctgctgactctgcacgcgcaggctccacggatccggcgcccagcccacccaggcggtggctttagacggcgaggcgagggtgacgtcccatttttgccagcggccgtcggtctgcacctgggatttcagcacgttgaagttaccgccgacgctccagtcgctatccggaataaagtagtcgaccgccccctcaacgccgtaaatacgccgtttgtcggactgaacgtcgatggtcatgtcggtgcggttgacgacaatggtcttatccgaggtcgagtagtacgccgccagctgggtgcgcaggttatcgccagtgtagcgccagcccagctcgtacgagttaactttgatcccctgcagcggcgagtcatcgacgttgacgctggagatcagcggcagatgaccattcaccgcagcgccatatttaccgatgccatagtatttaccagggtccggtagctcgacaccctgcgagaagttaaaccaggtttgttgacgctcggtcaggtgggccacgatcccggcgttaaacaggaaattgtcataatcggttttgccgcctttgatggcgtcggcggagcgcgctttgccgttggcgatatcctgctgctgggcgtagccgacaaagtcgtcgacccggttttcggtccactggtagcgtaccccgccgctgacggtaaagatatcgttcagatcgtagctggactgcaggaatggcgcgacattggaaatactgtatcccgggtagcggccggttgtgtagatcgattcgttgtgcaacccgccggaggccatcgattgtggcagatcgaagaacatttggttggcattaaaggtctcatgatcggcgtcgagaccccaggtgagatcccaccccgccagcggttggctgttgagggtcagcttggccccatactgatcggtatcctgctgcgacgaggagaagctactgacctgacctttcgtgagcgtcgggaacggatagaaggtgagggactcatcgcgatagtacacctggctcaccagattctggccgaaaaagtcggcatcggagtactggaggctgatcagatggcgttcggtgccggggatacggtcggaattgagcccgtcggtggtatacgctttgccgccgctggtgaccgcggacatgttcttcccgagccacagaccgtagtcatcatcgccctggcttttataatactgggtgaccagctgcagctggcggttatcatcgatctcaatcgtccccgtccccatcacgtcgaggcggtcagagtgctggagccccgtttgggtattatcgaggatcagcgcatcgttattgccgtcgtaccagccgccgaaacgctgataggctaccgacaagcggccggatgcgtggtctgttccgccgctgacggccgccgcgacgcgctcatcatgatcgttgctgttcgcaaaaccgctcttgctgcccacctcaagatcgacctgacgatcctgctgcccctttttggtaacgatgttgataagcccgccggtactgcccccgccgtacagcgaggtcgctccggagatcacttcgatatgttcgatgttgaatggatcgatggcgtcgagctggcggctgtcggtgcgtgaggagttgagtcggacgccgtcaatcagcacgacgatcgcgcgcccgcgcatgttcatcccatagttggtccgcccctggctgctgacgtcgatgccggggatcagctgcgccagcacgtctttgaactctttcccgccctggacctgctgctcaatctcctggccctcaatgacccaggtggtttgggccatttcggccacggtgcgatgggtgcggtttgcgctaacgatgatgctgtcttcatcagactgagccgccagcgcaggcagcgtgctggccagcagcagagggtggagcacccagaggcgctttttcatatccattccttttatgagcaagttgctttgtcgttgttatgggccggcgtcggccggtattcgttacaatgcgaaacatctggaaaaactcaaaaaaggattttgcacataatgaatatcgcaatcaatatcatttgcgtttatcttgcgcgagaaaagataataaaaatcaatctattttgtggggataaagccaacaggagagcggatccggcggcagaataccgccggaagcagggcgcatcaggactcgaggacctgcggccagagacggagagtggtatcggtgatttgcatcagcttgtcgaaatccgcgccttcccgggcgctaatcgacatcccctgcagaacgcagttaagaaattgcgccagctgcgcgacatcgcggcccgcgggcagttcgccctgcgcctgccgctgctgcagaaactgggttagcgcctgctcctgcatcgcatggcgggatttgatggtattggcgatatccgtcgaggaggcggccaacgcgggggaggtattgatgataaagcagccggccggcgtctctttgctggtaaagcaggtggcgaccgccgtgaagtagtcacgcaacgcgcgatcgacggattttccctcggcaaacagcacggcttcgtgcttcgcggcaaagcgcgaaatgtaacgatccaacactgcgcggaataggccttctttattcacaaattccgcatacagggtgggggcttttgctcctgtcgcctcgaccagatcggcgagcgaggtcgcctcatagccgtgctgccagaagagtgtcatggctttgtccagcgccgcatccctgtcgaacaccttcggtcggccacggctttttttggcgcaactttgaacgtcagttgtcatggtgccgttgtacctatgttggtttggtgaaaggccattataaaaataaacgatcgccggggccagcgctgtcggtttaaaaataaataattcatatatgtatgaaatttaagcattttataaatagttaaacgatcgttataaaaatgcattgacgtgtgatatagatcacattattatttacctatcgatcgttaagttaatgcttgcgaccctactataaaattcatctgcacaggtataataatcatgaaaaccgttaatactctggctattgccgccgttttaagttccctttctttcgccagctttgccgctgtagaggtgcagtccacccctgcaggacagcataaagtaggcaccatctctgcttctgccgggactaacctgggctcgctggaagaccagctggcgcagaaagcggatgagatgggcgccacttcataccgtattacttcggtaaccggtccgaatacccttcacggtaccgccgttatctacaagtaagcccgatgcgtcgctgcccggcccccttcaccggacggcgatgagtaagaccctgttgtacccctgtttgacccttgccaacaaaaaacccgccatcaggcgggttttttgttttatgcagcgtaagactacagcgactgcggtccaggctcagcatgacgggtgacgtcaatcggcatgcccgagcgataattcatcgcgcgctccatcaccgtcccgtcggtctgcggcgcctgtttgaacgcagtcatggccgcattaagcgtaatgggcagggtctgcgggtcgtcatcgatatgctcagacagcggctgatggacctcaaccagacggcggccatccggctcaaccgacgccttgatcggcgtgttgataatgttcaccttcgtgcccggcgagatagtgttgtacagcgccttgatatcgttatcgcgcagacgaatgcagccggaactgacgcgcataccgatgccgaaatcggcattggtgccgtgcaggagatagactccgccataggcggcgaggcggatggcgtgatggcccatcggattgtcaggaccagcaggcactaccgccggcagctcaatccccatagccttgtagcgcgcgcgaatgttggcggtaggtgtccaggtcggattggcccgtttgtcggacacggttgtgaccatcgtcggtgtgatggtggttccgcccagctggccgatgccgattgggtagacggtcacttcatttttgcccggcgggtaatagtagaggcgcagttcggcgaggtttatcaccagcccttcgcgcggcgcatcgggcagcagcgtctgcagggggatggtcagcacgctgccggcgcgcggaacataggggtcaaccccgggattggcctgcagcagggccaggaagccgacattgtacttcttggcaatcgcttccagcgaaccgccgtcatcctgtaccacatgaaactgattctgacccaccagccggctgcccggcgggggaaggggccaggtgttagcgcgcgcggggagggccagcgcggcgactaacgcgactagcgtcagccaaagcgtcacggggaaacggtttctcattaccataactccaaaatatgtaagtggttatttttatacgaaaagcagatgagattatggcgtgagtctgtgtggggaaatccaggcggattgcaaaatgtttgtaaagattgcgaggtatgtgggaagggagatacggcagtggggccgtatctcctgccagtcaggcgacggcgttctcttccagctggcgcataaactggcgaacccagtccatccgcgttttacgctcctccaggtcctgcatgaacttcaggcgcgtgggaccgtccaggcggaagtgctggggctgcttctgcagcaggccgatcagccacaccggattgacgttgtttttctcgttaaattcgatcacgccgcctttttcgttgctttccagcttgcggatccctaacttttgcgcctgctgacgcagacgggcgatatccagcaggttgcggacggcatcgggcaggcggccaaaacgatcgatcagctcgactttgatctcctccagatcctgttcgtttttggcgctggcaatgcgcttatagaatgacaggcgcgtattgacgtcagggatgaaatcatcaggcagcagggaaggcatgcgcagttcaacctccgtctgctgactggtgagatcttccagcgagggttcacgcccggctttcagcgcatcgactgcgttctccagcagctccatatacagggagaaaccgatggtttccatctgaccgctctgatcttccccaagcagttccccggccccgcgaatctccagatcgtgggttgccagcgcaaagccggcgccgagatcctccagcgacgcaatggcctcgaggcgcttttgcgcatcggtggtcatcgctttcggatgcggcgtcagcagccaggcataggcctggtgatgcgaacggccaacgcggccgcgcagttggtgcagctgggcgaggccaaaatggtcggcgcgttcgatgatgatggtgttggcggtgggaatgtcgatcccggtttcgatgatggtggtgcacaccagcacattgaagcgttggtgatggaagtcattcatcacccgctccagttcgcgctccctcatctgaccgtgaccgatggcgatccgcgcctccggcaccagctccgccagcttgtcggcggctttctggatgttctcaacgtcattaaacagatagtagacctggccgccgcgcagcgtttcgcgcaggatcgcctcgcgcaccaccagggcgtcatattcgcgaacgaaggtcttcaccgccaggcggcgcgccggcggcgtggcgatgatcgacagatcgcgcatcccgctcatcgccatgttcagcgtccgcgggatcggcgtggcggtgagggtcagaatatcgacatcggcgcgcatcgctttgatgcgctctttatgccgcacgccaaaccggtgctcttcgtcgacgatcagcagcccgagatcgcgcagcttcacctcgctctgcagcagcttgtgggtgccgatcaagatatcgattttgccttccgcggcctgctcgaggatctgcgcctgctctttagcgctgcggaagcgggagagcatttcgatgcgtaccggccagttggcgaaacgatcgcggaaattgtcatagtgctgctgagccagcagggtggtcggcaccagcaccgccacctgcttgtggttctccacggcgaggaaggcggcgcgcatggccacttcggtcttgccgaagcccacatcgccgcataccaggcggtccatggccagcggctggcacatatcgctgaggacggcgttgatcgcctgcgcctgatccggcgtggtttcaaatgggaagccgtcgcagaacagctgatactgttcgcggtcgtgtttaaaggcaaaacccgccttcgccgcgcgctgggcatagatatccagcagctcggccgccacgtcgcgtactttctcagccgctttttgtcgcgcccgggtccaggcatcgccgcccagcttgtgcaggggggcgttttcttccgccccgccggcgtagcggctgataagatgcagggacgataccggaacgtatagcttggcatcgttggcgtaggtcagcatcagatattcgccggtgatgccgccggcttccagggtagtcatgcccgcgtagcggcccacgccgtgttccaggtgaacgaccggctggccgatatgcagttcggcgaggttgcgaatcagagtgtcagggttaatggtgcgtcgcgaatcctgacgacggcgcgccacccgctcgccgagcaggtcgctctcgcaaatcagcgccaggccgcgctggctgtcgataaacccgtgctcggcggcgccaatcatcagatagcggccgttgccggtggcttcctccagacgcagcacatgttttggcgcaactttaatccgcgccagcatttcgctcagcgcttcacggcggccttcgctttccaccgagaagatcaccggaccggtaaaggactcgaggaagcggcgcagattatccagcggcgctttgttctgcgcctggacggcgaggtccggcagcgtctggtagcccagattagtattcgccgctttgtccgccagacgttcggttttcagctgcacgcgcggccattttttcagttcgctgaatagctcatcgctgcgcagccacagcagctcaggcggcaggagcgggcgcatcgggtcgacgccgcggttttcaaagcgggcgcgggcttcattctggaatcgttccgcgctggcctcgagatcgccggtgttgacgatcagcgtgctggccgggaaatagctgaataacggcggcagcggctcgctgaagaacagcggttgccagtattcgataccggcaggtagcgtccctttactgacctgctgatagatgtgctcggcatcgcgcttcacctcaaagcggtcgcgccactggctgcggaacagctcaatagcggtctggtcggtggggaactcgtgcgccggcagcaggttaatggccgccacttcctccagcgtgcgctggctgtcaacgtcgaacaggcgcaggctgtcgatttcatcgtcaaagaaatcaaggcggtagggctgatcgctacccatcgggaacaggtcgagcaacgcgccgcgggtagtatattcgccgtgctccatcacctgatcgacatggcggtagccggccccctccagctgatcgcgcagcgcatcgcgcgacaggcgctggccctttttcatcaccagcgcgtggccgtgaaggaagctgtgcggacagacgcgctgcatcagggtgctgaccgggacgatcagtacgccgcgctgcatggtgggtaactggtaaagggtggcaagacgggaggagatgatgtcctgatgcggcgagaagctgtcgtaagggagcgtttcccagtccgccagccccatcaccatgctgtcggtaaactgcctgatctcgtcgttcagacgcagcgcgttttgcatgtcaggcgccaccagcaccaccgggccgttgtggcgttcggccatctccgccaccaaagtggcgcaggctgcgccggtcaactcgccaagctggcgctgatcgccggctttgaccggcaatgagtatcgatattgttcaggcatagacggtttcatgatctcttagggattcgctctgccgatatggagggcaactcgctgatattcaatagtgagattatccgcgattggtctggattcgccaacccgaattgccatcgcgtgttgggtgaagaaaggtcagcgctgtcgataagcgtaaagataaataagtaagtacttatctatccgtttgtatttacttggtttttaggtttattgctaataaagtcgtcatgtatcagtcgtttacgctgcccctaatcgcttatatactcgggcatcggctatcagcaaccagatggatgacatgtaccaacctgccgcactctttatcggcctacgctatatgcgcgggcgcgcagccgaccgcttcggtcgtttcgtctcctggctctcaactatcggtattacgcttggcgtaatggcgctggtgacggtcctgtcggtgatgaacggctttgaacgcgagctgcaaaacaacatcctggggctgatgccacaggccattcttagcgccaaacagggttcggtgaaccctcagcaactgccggagcgcgaagcgaaacttaatggggtaacccgcgtagcgccgatcaccaccggcgacgtggtgctgcagagcgcgcgcagcgtggcggtcggggttatgctgggcattgatccggcgcagaacgatcctctgactccatacctggtgaacgtcaaacagagcgatctgcaggcgggcaaatataacgttattctcggcgagcagctggcgggccagctgggggttaatcgcggcgataaaattcgcgtgatggttccttccgcgagtcagtttacgccgatgggccgcgtgccgagccagcgtctgttcacggtcatcggcaccttcgccgccaacagcgaagtcgatggctatcagatgctgaccaacatcgacgacgcctcccgtctgatgcgctatccgctggggaatatcaccggctggcgcctgtggctggatcaaccgctgcaggtcgacaccctgagtcagcagacgctgccgccgggaactcagtggcaggactggcgcgagcgcaagggcgaactgttccaggcggtgcgcatggagaaaaatatgatgggcctgctgctgagcctgatcgtcgccgtcgcggccttcaacattattacctcgctggggatgatggtgatggagaagcagggcgaagtggcgatcctccagacccaggggctgacgccgcggcagattatggccgtctttatggtgcagggggccagcgccgggatcgtcggcgcgctgctgggagcggtgcttggcgccctgttggccagccagctgaataatttaatgccgatcatcggcgccttccttgacggcgcggcgctgccggtggcgattgagccgctgcaggtcattgttatcgccctggtggcgatggtgctggccctgttgtctacgttgtacccttcctggcgcgctgccgccacccaacccgctgaggctttacgttatgaataagatcctgctgcaatgcgacaacctgtgcaaacgctatcaggaaggcaatgtgcaaaccgatgtcctgcacaatgtcagcttcagcattggtgaaggcgagatgatggctatcgtcggcacctccggctctggcaaaagtacgctgctgcatctgctcggcggcctggatacgcccacctctggcgacgtgattttctccggtcagccgatgagcaagctatccaccgccgcgcgcgccgacctgcgtaaccgcgagctgggctttatctatcagttccaccatctgctgccggactttagcgcactggaaaacgtggcgatgccgctgctgattggcaaaaagaagccggcggatattgaacgccaggcgaaagcgatgctgcaggcggtcgggcttgaacaccgcagccatcaccgtccgtcggagctctccggcggcgagcgccagcgggtggcgattgcccgcgcgctggtgaataaaccgcggctggtgctggcggacgagccaaccggtaacctcgacgctcgcaacgccgacagcatcttccagctgctgggcgaactgaacgtcgcgcagcgcaccgcgtttctggtggtgacccacgacctgcagctggcgaagcgcatgagccgccagctggagatgcgcgatggccgtctgaccgccgacctgaccctgatgggggccgagtaatggcgtctccgttatcgttactgattgcattgcgtttcagccgcggccggcggcgcggcggcatggtgtcgctgatctcggtgatctccaccatcggcattgcgctgggggtggcggtgctgatcgtcggcctcagcgcgatgaacggctttgagcgcgagctgaataaccgcgtgctggcggtggtaccgcatggcgagatcgaacccgtgaatcagccgtggaataactggcaggaagcgctggcgaaggtgcagaaggtgaaggggattgtcgcggcagcgccctatattaacttcaccggtctggtggagagcggcagcaatatgcgcgccatccaggtgaaaggcgtcgacccgcagcaggagagccagctcagcgcgctgcctacctttgtgcagaataacgcgtgggccggattcaaggctggcgaacagcaggtgattctgggtaaaggagtcgccgatgccctgcacgtgaagcagggggactgggtgtcgatcatgatccctaatgccgacgccgaccatcagctgctgcagccaaaacgcgtcaggctgcatgtgaccggaattttacagctgagcggccagctcgatcatagttttgccatgatcccgatgcaggatgcgcagcagtatctggagatgggcagcagcgtgaccggcatcgccatcaaggtcaccgacgttttccatgctaacaagctggtacgcgacgccggcgaggtgaccaatagctacgtctacatcaagagctggatcggcacctatggctatatgtatcgcgacatccagatgatccgcgccattatgtacctggcgatggtgctggtgatcggcgtggcctgctttaacatcgtctcgacgctggtgatggcggtcaaagacaaaagcggcgatattgcggtgctgcgcacgcttggcgcaaaagacggcttaattcgcgcgattttcgtgtggtatggtttattagccggatcggtaggcagcctgtttggggtggtgatcggcgtgatctgcgcgttgaacctgacgtcgatcatcaacggcatcgaatacctgattgggcataaattcctctccggcgacatctattttattgacttcctgccgtcagaattgcactggctggacgtcttttatgtgctggtgacagcactgttgctgagtttgctggccagctggtatcccgcccgccgcgccagccgcatcgacccggcgagggtgctgagtggccagtaatttatcgtcatcgtcggcctggctgacgacaaaagaggaattgctgaaatgtattatggatttgacattggcggcagcaagatagcgctgggcgtatttaatcaggagcggcgactgcagtgggaaaaacgcgtcgccacgccgaaaagtagttatgaggattttctccaggcggtagaggcgctggtccgcgaggccgatgatcgcttcgaccagcagggttcggtcgggatcggtattccgggaatgccggaaacggcggacggcacgctgtatgccgctaacgtgccagccgccagcggccggccgctgcgcgctgacctcagcgcgcggctggggcgcgaggtgcgtctcgataatgacgccaactgtttcgcgctgtcggaagcgtgggacgatgagtttacgcaatacccgctggtgatgggattgatcctcggcaccggcgtgggcggcggcctggtgttgaacggtaaatcgattaccggacatagctatatcaccggcgagttcggtcatattcgcctgccggtggatgccctggaggtggttgggcgcgattttccgctgctgcgctgcggctgcggccagctgggctgtattgaaaattatctctccggtcgcggtttcgcctggctgtacgaacatttttatcagcaaccgctctcctcgccggagattgtggcgcagtggcagcagcacgatccgcgcgcgcaggcgcacgttgagcgctatctcgatctgctggcggtgtgtctggggaatatactgaccattgtcgacccggatttgctggtgctcggcggtggattatctaactttacggcccttagcgaagggctggcgcaacgattgccgcgccatcttctgccggtcgccagggttccgcgcattgagcgcgcgcgccacggcgatgccgggggaatgcgcggtgcggccttccttcacctgacccattaatcacagaggtagctatgcagtcgcgccgtttacatcgattgagccgttttcgtcgcaataaacgtcggttgcgtgaccgtctgcgtcagcggattttctttagggaggacaggatgaagcctgaagcgatggcaaaaccgagagtggtggtgttaaccggcgcgggcatctcggcagagtcggggatcaaaaccttccgcgcggccgatggcctgtgggaagagcatcgggtggaagatgtggcgacgccggaaggcttcgcccgcgatccggcgctggtgcaggcgttctacaacgcccgtcgtcgtcagctgcagagtccggaaatcgcgccgaacgcggcgcatctggcgctggcgcgtctggaggatctgctgggcgaccattttctgctggtcacccagaatattgataatctgcacgagcgcgccggcaaccgccgggtgatccatatgcacggcgagctgctaaaggtgcgctgttcgtggagcggccaggtgctggagtggaccggcgacgtcaccgccgaggacaagtgccactgctgccagttcccggcggcgctgcgcccgcacgtggtctggtttggcgaaatgccgctggggatggatgagatctacagcgcgctggccgacgcagatatttttatcgccatcggcacctccggccatgtctatccggcggctggctttgtgcacgaggcgcgactgcacggcgcccataccgttgaactgaacctggagcccagccaggtgggcagcgagtttgccgagaagcactacgggctggcaagcgaagtggtacccgcctttatcgataagctgctacaggaaaacgcgctgtaaactgaagccgcctgccggtagccagggcgcagcccacggccgccggcagcgctgctgacaaggatgtcacgtcatgacaggagtcagaccatgcataatccgctggttatcgaagcgatcatgttgatcgcggccattatcgttggcgtctggagccagcgcgctttaccgctacacgccgatagccgaccgatcctcttcctgctatgtctgttcctcggcactggcagcgcgttgtgcctgctgctggatatcttagctctgctgttgaccggtcaggtcgcgacgggcggtgtgcgaatatacggtccgttgctgctgctggtggtgctgtggaaacctctcaactgggttgtcggcatcattgaagattttgtgcagcggcgagccgaaaaagggaagggcaaaggccagcacgacggcggtcaacgctgatcgttttccgctgcgccacgcacgctatcgcccggcccggagtcgggcgatacgctctctgagtaatgatcttccggtcatgagtttgtcttttcctttctgaaccatttcccactctattttgtgcgtgaccgctgatttctgtacgtttttttgtgcagaccggcaaatgtagaccagattcaataggcgcccgcacgatcgcgccgcgcccctcgattccgccggacgtctgtaaaggagaccccgccatgccgtcaccgatgatttatcaggatctcaccactgccgcgctgctcggccatgcggcgcagtatcacagcgagaccgagattgtctcggtgagtactggcggtgagaaggagcgcagctgctggggggaggtggccagccgtgctcagcggctggcatcggcgctggcgtcgctggggctgccgccgggcgcccgctgcgccacgctggcatggaacaaccgccgccatctggagatctattttgccgtctcctccggcggctgggtgacgcacaccgtcaatccgcggctgtcggttgaccatctgcggtatatcctcaacgacgctgccgatgaagtgctgttttttgaccagacctttttgccgctggtagcgcagctgctgccgcagctgccgacggtgaaacacgtcgtgctgatggagtcccgcagcgaagcggcgctcagccagctgccctcattgctgttttatgacgatctgttgcagcaggggatggcagactatcgctggccgcagctcaatgaactgactccggcttcgctctgttacacctcgggaaccaccggccggccgaaaggggtattgaacacccatcgttcgctggtcctgcacgccctgagcggcaaccagccggacgccgccggcatatcggcgaaggacagcctgttgccggtggtgccgatgttccatgtcaacgcgtgggggacgccgtttatcgccgccatggtcggcgcgcggctggtgctgccggggccgcacctcgatggcgacagcctgctgcagctgctggccgccgagaaggtgacggtggggtttggcgtgccggtgatctgggccggcttgctggcggcgatgcgccggacagaggtccggctgcctgaatttaaacgtgcgctggtcggcggctccgcgctgccgccgtcgatggccgaggcctttcagcgtgattacggcattgcactgacccacgcctggggaatgaccgaaacatcgcccatcggcaccatcaacacaccgttgagcaaacatgacgcgctcccggcacaggagcagcaaaagcagtgcgccggtcaggggcggcccattttcggcatcgaactgcaggtggtggacgtggatggcgaaccgttgccccgggatggtcaaagccaggggtatctgcaggtcagagggcactgggtggtagagcaatactatggtcaggacgcgagcgccctgaccgcggcaggctggtttgataccggtgatatcggtacgctcgacgccaatggttatctggtgatcagcgatcgggcaaaggatattatcaagtccggtggcgagtggatctccaccgttgagctggagaatatcgccatcgcgcatccgggggtgcgcagcgcagcggccatcgccgcccgccatccgcgctgggacgagcggccggtgctgctgtgcgtccgtgcggaagggggcgaagtggaggagaccgatctgctgagctggtttgagaagcgggtgcctaaatggcagatcccggaccgggtgatatttgtcgatgcgctgccggtcagcgccacgggtaaggtgctcaaaaatcagctgcgccaggcctacggagagattttaatgagtgagggaaaatgagccatgcgcgacccggtctgacgacctgttctcagtatgatgcggccctgcacgccttgtcggcggcgcgccagcgctgggcggaaacctcagtgaaccgtcgtctggcgctcctgcgccagatcaaggatgccctggccggcattgccccggcgtgggtggccgcggcagcggcggccaaagggttgccggcgggcgatccgctggcgggggaggagtggctggcgggcccctgcgcgcaaatggtcggctgcaacgggcttatcgccaccctggagcaactggaggagaagacctttctgcggcggatcccactgcggacgctggcggacggccgcctggcgctgcgggtggtgcccggcacgctctgggatcggctgcttctgtctggtgttcgcgctgagatatggatgcagccaggcgtcacccgggcccatctcgaccgctatgcggcgcgggcatacgacatcccgcctgccgcgcggcagggcaagctggcgctggtgcttggcgccggcaatgtggcctcgattgcgccactggatgtgctacacaagctgtttattgagaatcaggtctgcctgctgaagctcaatccggtgaatgattatctgcacgatctgctggcccaggccctggcgccggtgattgccatggatgcgctccgcatcgtcaccggcgacgcccgggcgggagcgtggctgactacccatcccgctgtcgatgagatccatatcactggctcccgcgagacccatgacgtcatcgtctggggcgagggtgagacggctcgccagcgtcgggccgccgggacgccgctgaacccgcgtcgggtgacctcggagctgggcggcgtcagccccaccattatcgtacccgggccgtggagcgaggcggacatcgcttttcaggcgcagcagctggcgacgcagaagatgaacaacggcgggtttaactgcgtggccagccaggtgctgatcctgcagcaaggctgggagcctgcgacggccttgctgaatcagctgtaccgactgatcgccgcgaatacccgcccggactactaccccggcgctgaaaaccggctgaccgactttcgcctgcgcgcccgtcagccgctggagatagcccgcggtgacgcgctaccgttgattgtggcgaataccgacgatcatcccgggttctgccagcaggaggtctttggcccggggctgtcggtcacccgtcttgaggccgatagtgcggaaagctttctgcgccaggcgatcggctatgcgaatcagcggctgcagggcacgctgggggccaatattgtgatccacccgcgcacccgcaaagcgattggacgtaagcgttttaatgcgctgattgccgagctgcgctacggcacggtggcgatcaactgctggagcggggtggccttcctgttagccccttgcccgtggggggcgtttcccggccacacgctcgacgatattcagagcgggcggggcaaggtgcataacagctttatgctggagaaaaccgagcgcacggtgattgaggcgccgtttcggccgtttccgcgtagtctttggcatggcgaactgacgctgatgcccctgccgccctggttcatcacccaccgggggcaggaagcggtggcgcagcggctggtggatttttaccatcggccgcgctggcgcaaattgccggcgctcctctggcgcgcgctgcggggctaaggtgagagcaaaaaaaaggcggaaccgcggttccgccctgcgggattaacggcccgctttcagcttctggtaatactcttcataaatggcgctggcgctgccgacgtcattctgccattcgcctttctcaatggttgcggcgtccggatagagcgatttatcgttggccactgccgggctgagcatcttgcgcgccgcaaggttcggcgtcggataaccgatggtttcagcgacctgtttggcgacatccgggcgcagcaggaagttaatcagcttcagcgcgccgtcgacgtttttggcgttcgccgggatcgacaggctgtccatccagaagatgccgccctctttcggccagatcacttccagcggagtacctgcctggcgggcgacgtaagccgagccgttccataccatcccgaggttcacttcgccttccatatacgggttcgccgggttatcagagttaaacgctgcgacgttgggcatcagctttttcagctcgttataggcggcttcaatctctttcgggtcggtggtgttgccggaatagcccagcttacgcagcgccatctggaacacttcgcgcgcgtcgtcggtcagcagcaggctgcttttgtattccggcttccacaggtcggcccagctggtgatagttttcgggtcaatcgcctcgctgttgacgccgatggccgtcgccccccagatataggggatggagtagtcgttattcggatcgaacggtttattcagcatctgcggatcgaggttgctgaagttagtcagcttgctcttatcgatcttctgcagcatgccttctttgcgcatcttgtcgacaaagtaggtcgacgggacgaccaggtcgtacgcgccgtctttataggttttgagcttggcgtacatggtttcgttcgactcgtaggtcgaatagataaccttgatgccggtctctttggtgaactgctccagcaggcccggcggcacatactcggtccagttatagaaatagagcgttttgctatcgtccgcgtgcgcagcgcccatgccgattgccagagcgctcgccgcgagcaggtggcgtgaccattttttcattttaacgtcccctgagttttatcacgtgcaattaactgactggcgatgaccatcaccagcgacagaaccaacaaaatcgtggccagggcgttcacctctggcgaaacgccaaccttgaccatcgaatagatcttcagtggcaggatttcataccccggaccggtcacgaacgaggagactaccacgtcatccatcgacagggtgaagctcagcaaccacccagcggctaccgccggcagggccagcggcaggataattttgcgcaggatggtcatctcgctggcgcccagatctttcgccgcctccagcatccgcacgtcaaagcctttcaggcgggagtaaacggtgaccaccacaaacggcaggcagaaggtgatatgcgaaaacagcagcgaccagaaaccaagctggacgccgatcagcataaacagcaccagcagagagatggccatcacaatatctggcgacatcatcaccacaaacagcatgccgctgacaaacggtttgccgcgaaagcggtaacggtacagcgccacggcggtcagcgagccgataagggtggcgaaggtcgccgacagcaccgccatggtcagcgagtgctgggcggcctgcagcaggctatcgttgttcatcagcaggctataccagtcggtggtgaacccctgccagttgatgccgaagcgcgaccggttaaacgagttaacgatcagaataataatagggatgtagagatacgcgtagatggcggtcataaagccgccgcgcagcagtcgaccgatcattccagctccacctttttattcagcaggcgcgccgcgcgccagtaaatcaacagcatcaggcccatcaccagggttaaggtaatgctggttgccgcgccgaacggccagtcgcggatattgaggaactggcttttgatcacgttgccgatcagcaggttcttggcgccgcccatcaggtcggaaacgtagaacaaccccatcgccggcagcatcaccagcagacagccggcgatgatccccggcatagtcagcgggatgataatgcgaataaaggtctgcagcttgctggcgccgagatctttcgccgcttccagcagcgggcgatccagtttctcaatgctggagtagagcggcatcaccataaacggcagcaggatgtacaccaggccgatgatcaccgccgagggggtgaacataatgcgtatcggggtgtcgatcacccccagccacagcagaaactcgttcaggtaacctttagtgctgaggaaaatcttcagcccgtagatgcggatcaacgagttggtccaaaaagggacgatcagcaggaacagcagcaggggccgtaccttctgcggcagccgggcgaggaaccacgcaaacggatagcccagcgccaggcaggcgagggtcgccagtagcgccatgtttagcgaatgcagcagaacgtcataatagagcggatccagtagccgcgaatagttatccagcgtgaagaccagtttgacgaagttggcatcgtcgcgggtcaaaaagctggtggcgatgatcatcaggttgggcaggaagacaaacagcaccagccaaccgacgatagtggcgatcaccacattctggaatttactggtgttcttcatcggccagcaccacctcccagctttccacccaattgatagacattttctggtcaagagagtggtcgaaatccgggtcgtcttcgttaaagaactcgctgaccatcaccattttgccgttctccagttccaccaccgactccagagtcatgcctttatagttgcgctcgcggacatagccgatcaggccatcggcgtcgctgttatggtggatctcgtcgacgcgcagatcttccgggcgcagcaggacatgcagacgctggccggcctccacggcaaaattgacggtgatgttgcattcccgtccttcaacgctggcgcgcacgcgctgttcgtcgagacgttcaattaccgtggcgtcaaagatattgatctcgccgataaagctggcgacaaacaggttcttcggctcttcgtagatctctcgcggggtgccgtcctgttcgattttgccatcacgcatcaccacgatgcgatcggacatggtcagagcctcttcctgatcgtgggtgacgaagacgaaggtgatcccgagcttacgctgcagcgctttcaattcgttctgcatctgcttgcgcagcttgtaatccagtgccgaaagagactcatcgagcagcagcagacgcggtttgttgaccaccgcgcgggcgatggccacgcgctgctgctggccgccggagagctggtgtggtttgcgctgggcaaacgcctccagctgcaccatctttaaggcatccatcacccgtggggtgatttccgccgccggggttttctgcatccgcaggccaaaggcgacgttctcgaacaccgtcatatgcggaaacagggcgtagctttggaatacggtattgacgtggcggttttccgccggaacatgagtgatatcgtgatcttcgagatggatccgtccgctgtcgacgttttccaggccggcaataaggcgcagaacggtggttttaccgcagccagaggggccaagcagagtgagaaactcaccattgttgatggtcaggttaaggttgtcgatgaccgttttaccatcaaagctcttgcgaattcccgccagatgcaccagcggcgaacgcgaacgcggttgtatattcaatttttgactctgtcccatgtagacgcaacggcaaatttccggccgctgcggggtttgtgattaaccacctttggggttgcacgtttttaataagggccagcattctacggcaaacgagggtaatcgccaatccttgatacacccgcatagtctacctttacaccataacgtcggttccgttattaaatttcgctttacgggctaaaaatgacctgacgcaatatttgtcttttctggcttatgaataatgttgtcacaaaagaagagggtggctacatggataaattgcttgagcgttttttgcagtacgtttctttggacacgcagtcaaagcctggcgttcgtcaggtccccagcacggaagggcagtggaagctgttacgcctgttgcaggcgcagctggaagaaatgggactggtcaaggtaacgctgagtgaaaaagggacggtaatgggaactttgcccgctaacgttgagggcgatatcccggccatcggttttatctcccacgtcgacacctccccggatttcagtggtaaaaacgttaatccgcagattgttgaaaactatcgcggcggcgatatcgcgctgggtatcggcgatgaggtgctctccccggtgatgttcccggttctgcatcagcttttgggacagacgctgatcaccaccgacgggaaaacgctgctcggggcggacgacaaagccggcattgccgaaattatgaccgcgctggcgaccctgcaggcgaaaaatattcctcatggcgatatccgcgtggccttcacccctgatgaagaggtgggtaaaggggcgaagcatttcgacgtcgaggcctttgacgcccgctgggcctataccgtcgacggcggcggggtcggcgaactggagtttgaaaacttcaacgccgcctcggtgacgataaaaattgtcggtaataacgtgcaccccggcaccgcgaaaggggtgatggtcaacgcgctgtcgctggccgcgcgcattcatgccgaagtaccggccgatgaagcgccggagaccactgaaggctatgaaggtttttatcacctcaccagcatgaaaggcagcgtcgatcgggccgagatgcattacatcatccgcgattttgaccgtaagcacttcgaggcgcgcaagcgcaagatgatggagatcgccaaaaaggtcggcaagggactgcacccggactgttatattgagctggtgatcgaggacagttattacaacatgcatgagcaggtgatcgcccatccgcacgtggtcgatattgcccgccaggcgatggtggactgcgatattgaaccgcagatgaagccgatccgcggcggcaccgacggcgcgcagctctcatttatgggactgccgtgcccaaacctgtttaccggtggctacaactatcacggcaaacatgagtttgtcaccctggaaggaatggagaaagcggtgcaggtgatcgtgcgtatcgccgagctgacggcggcacgcaaagggcattaatcttctcaggcggcccggtaaggccgcgtgtcggacaagatgccggatggcggcttcgccttatccggcctacggtccagccggtgagcgcggaacccgtaggcccggcaagcgcggcgccgccgggcaggatgatggctcagtcgccaaagaaccaatagccgctgttgaccagcgctgccagcatggcgaggaaagaaggatcttccagcgcatcgccaaaatggtcggcgcgcagcgtcagatgggtggctaaggcgtccagcgccggacggtgcggggagtcgatcttctcgccgttaacgaatacctcgccgtcaatgcgcagcacccgcaggccgcccaggcgttccagggtatcgccctgctgcagggcatcgtaaatctcatctggctgatacggcggctccggcggcgcgacgtcgagctcatgacgcgactgggtgataaactcgccgaaccactgcttaaagtgctccggttggttaatcagacccagcatcatctcgcgcaggcggtcgagttcggtcggtaaaatatccgccggatggtcgcgggacggcacgtccggatcggcgtagcgctggctgcccagttcgcgctggaggacatagtcggcaaagccgctaaacagctcgcgggcattcggcgcgcgatagccgaccgaatagttaagcgagttttccagcgaataaccctcatgcgggaatcccggcggaatatagagaatatcgcccggctccatctcttcatcgatgatcgcctcgaaggggtcaacctgcagcaggtccggatgcgggcagtgctgtttcatcggcaccttttccccaacgcgccagcgccgacggccggtgccctgaatgataaacacatcatactgatccagatgcgggccgacgccgcctcccggcaccgagaaggagatcatcaggtcgtcgatacgccagtccggcagggcacggaacggatgcatcagcgctgcggacggttcatgccagtggttaaccgcctgcaccagcagggaccagttgttttcgctcaggtgatcgtagctttcgaaaggaccgtgactgacctgccattttccatcctgatggctgacaaggcggctatcgacctcgctctccatggccagtcctgccagttcgtccgggcttagggggtcgataaaattggcgaagccgcgcttcaataccaccggccgtttttgccagtagcgttcgataaagtcgggccagttaagcgttaattgataatccatattgatattccactgcaggtgtctgacagggattataacggatgcggcgccctggcgatgcaggcgccgtgaaaaatctcaacgattaactctgtttatcttccatctgctggcggccaaacaccacctccatgcaggcgccgccgagcaggctttccccggcgatgatctctccatcatattgttcgacaatttcacgcgcaacggagagccctaccccctggccgggacgcagggtatcagcccgctggccgcggtcgaaaacggcccggcgctggctctgcgggatccccggcccatcgtcttccaccaggatgtgcagatggctgtcggtggtctggcgcacggaaacttccacgaactccaggcaatacttacaggcgttatcaagaacgttacccatcacttccataaaatcgttctgctcgccgacaaaagtgatctccggcgagatgtcgagcgagatattgacccctttgcgctgatagaccttgttgagagcggaagtcaggctgtcaagcaggggggcgatcgggtgtaattcccggctcaagagggtgccgccgctgcgcatgctggcgcgatgcaggtaataaccaatctgctgcgagatgcggcttatctgctccagcatcaccggctccgcctcgtcgacgctgatcttctcgccgcgcagcgagcgcagtgtactctgcatcaccgccagcggcgttttcagactgtgagtgagatcggtgagggtagtgcggtatttgtcatagcgttcgcgctcgctgcgaaccaggcggttgaggttgctgaccagccgggtcagctcgcgagtggtgttgggattgagcttttcgcggtgatgttcctccagttcgcgcacctctttggccagcgactcaatgggccgcaggctccaccaggcggcgacccacagcagggggatcaccagcagcaggttggcggccagcacatagacaaaccagctccacaccatatagctgcgcttgagctccaccggaatggtgtcgaccaccacaatgctgagctgaggcattttgctggtggccgggtagaggttgatcgccaccgagtgggtcatctcagagtcgtcgccctgttcgcggatagcgtccagctgttcctgaatctcatggttattgcgcaacagcatactgctgctgtcgacatcggcttcaatctcatggaagccattgcgtttcagccattccggttgaatgcgtttcgccagccatggaacatcacgctgcgcccacagcagtttgccctgctcatcgtagataagggtcaccgtcgggctttccatattcaggttttccgggatgtcgacgtcaatagcgccgttttcccatctcgccagcatataaaagagattgctctcgccgcgcagcaggcgaaaggtggttttatcgaagctaacgctatagcccaccagggccaccatgccgtaggccagggagagcaccagcaccaccccggcggtcgccagcaggaagcgaacccgtaatgacagcgggaagatatgccgcaacagtcccttcatcagcgcaattcgaacagatagccctggccgcgcaccgtggtgatgacgtcctgtgggtattcagcctgaattttcttgcgcagccgacccatcagcacgtcgatggtgtggctttctcgcagttcggcatccgggtaaagctggagcatcagcgaatctttgctgaccactttgccgcggttacggatcagggtttccataatggtgtattcaaaggcggtcagcttgatcggctggtcattcaccgacagctcgcgccgggagaggtcgacctggaacggcggcagggagatcacctgcgaggccagaccgctgttacggcgcagcagcgcctgcatgcgggcggcaacctcttcaatatggaaaggcttggtgacgtaatcatccgccccggcgctcagcacttccactttatcctgccatccttcgcgggcggtcagcaccagcaccggcagcgacacgtcgtggctgcgccagcggcggatcagtgataaaccgtcttcatccggcaggccgagatcgacgatggcgatatccgggagatgttcgcccagatagtagtccgcttccctggcatcttccgccgcatcgacctgatggcccagctcctgcagctgaactttgaggtggtgacgcagcagggcattatcctcaaccacgagtacgcgcatggctgttctccctagcattttcgatagtagtctgacgctcattatatacgcaaaatataaacggctgttaaataaagctttttataaaaagggcccctggtgcccccgggctggccgcgccctttgcgcatactgcatggaactccttcattctatgcgtaatttcagtaaacgcccagcggcaggatgcgaacggcgagcgggttggtgatgttaattttttgtgtaatagtactggaataacccctcaagaacgtcgcaggttatccattatgtctcagcagcagagcgcggactgggtcaggctggcgcaatcgcccagccggacggaacgcatcgaagccttcttcggcggccacggctacgaaccgcaccggcatgatacctacgccatcggccagacgatcgccggcgtgcagagctttcactatcgcggcggactccagcacagcctgcccggcggaacgatggtgcttcatccggacgaaatacacgatggcgaggcgggcaccgaggcggggtttcactaccgtatggtttatatcgaaccggcgctgatccagaagatactcggcggcaggccactaccgtttattcccggcggcctgtcggcggatccgcgcctgcggtgcgccgcgctgccgttattaaaagcggtcacggacacctttgagccgctggaggaagaggacgccctgtacgacctggcgcagaccctggccgttgtcggcggccaacgttcccgtcgccaggcgtttgattatcaggcggcggagagggcccgggagtatatccatgcctgttttatgcaggatatgaccctcgacaccctgtcgcaggtcagcggccgggaccgctggagcctgagccgggatttcagaacgctgtacggcaccagcccgtggcgctacgtcatgatgcgccggctcgatttttgccgccagcggatgcgcgccggggaacgtctggtggatattgccgccgacgcgggctttgccgatcagagccacatgacgcgccagtttatcagccgctttggtctctctccgggccgctggctgcgggcgatccgcggctagcgcggttcaggttgcacaatcgttcaagcgtgaccgcggcgaggcgaactatgctgactgcctttatcacaaggagacagcccatgtatcaactcgttaatcttgctcagaaattttccctgttcagcgaacaatggcagcccaaagtggtggctgaaatgaacgactatcagttcaaggtcgtgcgcatcgccggcgactttatctggcacagccacctggaaaccgatgagacattgatggtggtggagggggtattgcgcgtggacttccgcgacgggcatgtgctggtgaaggccggggagatgatcgtcgtgccgcgcggggtggaacataagacctcggcggagacggaagcgaagctgatgctgattgagccgcgcggggtgttgaataccggccacgagggcggcgagcggacggcggtgaacgacgtttggatctgatccctttccggcgataaaacgcccctctttccggcggaaagaggggcagggcgattacttcagctcgtcaaccatggtggttgcccgaccgatatagttggccggggtcatcgctttgagacgcactttttcctcttccggcagggcgaggctgtcaataaactgcttcatcccttccgcgtccacgcgtttgccgcgggtcagctctttcagcttctcgtacggtttttcgataccgtaacgacgcatcacggtctggatcggctcagccagtacttcccagttgtgatccagttcgtccagcaggcgatcctggttcagctccagcttgctgatccctttgagggtggactgataggcgatcagcgcatagccgatgcccacgccgaggttacgcagaacggtggagtcggtcaggtcgcgctgccagcgggaaaccggcagtttgctggccaggtgctgcatgaccgcattggccaggccgagattgccttcggagttttcgaagtcaatcgggttcaccttgtgcggcatggtggaggagccgatttccccggcgatggtcttctgtttgaagtggttgagcgcgatgtagccccacacgtcgcgatcgaagtcgatcagaatggtgttgaagcgcgcgatgcagtcaaacagctcagcgatatagtcatgcggctcgatctgcgtggtgtacgggttccactgaatacccagcgaggtaacgaactcttcgctgaactgatgccagtcgacttccgggtaggcggcgatgtgggcgttgtagttacccaccgcgccgttgattttaccgaggatttccacctggttcagctgacgatactgccgctccatacggtaggcgacgttcgccatctctttacccatggtggacggcgttgccggctggccgtgggtacgggagagcagcggcacatcgcggtactgggtcgccagatcttttaccgcgtcaatcagcttgcgccagtaaggcagaaccacttcgtcgcgggcggttttcagcatcagcgcgtgggagaggttattaatgtcttcagacgtacaggcgaagtgaataaactctgataccgcgtgcagctcggcgatgtcagcgactttttctttcaggaaatactctaccgctttcacgtcgtggttagtggtgcgctcgatggttttgatgcgctccgcgtcttcaacgctgaaatcggcgacgattttatcaaggaaaccgtttgcgtcggcagcaaaagcaggaacttccttgatcgctgcgtgggcggccagtttttgcagccaacgtacttccacctgaacgcggaatttcagcaaaccgaattcgctgaagataccgcgcagcgcgctgactttatcgccgtagcggccgtctacaggggaaacggcggtcagtgaggataattccatagatcacaactccggggttaaatgagcaagaatttgctttgcctggttaaccagacgattacgggaaaacataagctgcagacgtccgccgcccacctgatgccagagcaccgcggcgcgaatacccgccagcagcgctgagcgaactttcgcctgcacctgcgggctttgcagcacggcaggggagccggtcacctgaatacgcggccccagcgggcttatcacatcgacatagatgcccgccatggcgctgagcagcgtttcggactgcaggtcaaagtgttccagctgacggtgcaggccggcgatgcggttgccgagcgtgtccatcgcccctttactggcggcgagcttgcgctccagcaccatcaggctcagggtatagcgcgtcagttcagcattgaggccctgacggctgctggtattgagcacccctagcagcgtttcaagaccgaggcgaagattggcttcactgccaccgaacaccgccagcgtcgactcaggatcgaggtcgatgatgctgttcagcgacacatgcagggcatcgctgtcgcaatgtccctgatgcgccagttgctgaaccagtcgcgccgcctggcaaacgccagccagcgccagggtgatgtcatagtaattcttcgccacacatactccttgtcagccgccagggcggttcgtcccggcggaaataacgcgcgttcaggactgcagaggcagtcgttgttcaataattccgccgccgaggcacacttcccctaaatagaacactgcggactggcccggggtcaccgccgcgaccggctcatcgaagcggacttcgatacggtcttcatccagcgcggtaacggtgcaggggatatcggtctggcgatagcgggttttcaccgtgcagcgcagggtgccctgcagcggttcacggtttacccagtgcagctgttgggcaatcagaccgacggacatcaggcgcgggtggtcatggccctgggcgacgataagaatattattctcaacgtctttatcgaccacgtaccatggatcttcgctaccctctttggtgccgccgatacccagccctttacgctggcccagggtgtggtacatcagcccctgatgagtaccgatctcctcgccgtcgacggtgaggattttgcccggctgcgccggcagatagcggccaaggaaatcgcggaatttacgctcgccgataaagcagatgccggtggaatcttttttcttcgcggtgatcagatccagctcttcggcgatcttacgcacctgcggtttttccagctcacccaccgggaacaggctctgggcaatctgctcgtggctaagggtgtagaggaagtagctctgatctttgttgccgtcgaggccgcgcagcagctggcttttaccgtcgacatcggcgcggcgcacatagtgcccggtggcgatgtagtcggcgccgaggtcttcggcagcaaactcgaggaaggctttaaatttgatctctttattgcacagaatatccgggttcggcgtgcggccggctttgtactcttccaggaagagctcaaagacgttatcccaatattcggcggcaaagttaacggtgtgcagttcaatgcccagcttatcgcagaccgcttgcgcatcggcaaggtcggcggcggcggtgcagtattcctcgccgtcgtcttcctcccagttcttcatgaacaggccttccaccttatacccttgctgcagcagcaggtacgcggagaccgaggagtcgacgccgccggacatgccgacgatcacttttttctggctttctgacatggaaatactcgctacattgaacttcgaggcggcgtattctagcacgcgctcaccgttcattcaccccctgtgaacggccagttaaatgcgccaatcagcgacagcggctgccgcgggtcctgcaggtagcagcgaatgctttcggcaaccagcggcgagcgcaggttcggcgcgttaagaatttcctcagcactgagccacaggcagcgatcgatatcgctgtcgtgtggttcagtggcgcacagatcgctaagttcgatggcgaacaggaagcgcagaaacggcgtgttatcgggagccagccactgatgcatgcggatgaagtgctgcggcgtggcgcgaatgccggtctcttcccacagttcacgttcggcggcctgcagcagcgtttcattggcctcgagatggcccgccggctggttccacagcgctttgccgttaatggtttcttcgacgatgagaaatttatcctgggcgtgaaccacgcaggcaacggtgacatgaggtttaaacatcgcttttccttttcagttattcggctttgcgccagtcgccgttggccagtccgtcgagggtatagccgcccatggcgtagcggatcagccgcagggtggggaagccgacgtgggcggtcatccggcgcacctggcggttgcgtccctcgtagagcgtgattttcaaccagcgggtgggaatcgatttgcgctcacgaatcggcgggttgcgcggccacagccagacgggttcctcgacaagttctacgccggcaggcagggtggggccgtcgttaagggtgacgccgtcgcgcaaggcggtcagcgcctcgggcgtgggttcgccttccacctgaacatagtagatcttgccggtgcgcttacccggctgggtcagcttcgcctgcagcgcgccgtcgttggtcagcaccagcaggccttcgctgtcgcgatcgagccgacctgcggcgtagacgcccgccaccggaataaaatcttttagcgtgctgcgcccggcttcatcggtaaattgcggcaacacatcatagggtttattgaacaagatcacagtttttggctggcgttctttacgttgtctggtgacttgttgtgtgctgaatcgctcaacgcgatgttttctaaatgaagttttctgcatggtattttcaggctttatcaattgccgcattatagcctaattacgaatgcctttcatggacgcaaacattcaggtagtattgacatgctcattacaaattattaacaaaaaattgctcaaaccgattcgcactacaggcaggaaggcgacacggacgcgatagctccggttagcgggaagacccggtacgccgaagctggccgactcagccaacaccaggctcgcgtgaagagggaagagcagaaccagaagcgctcgaaggagaggttaatggaaagcaaagtagtagttccggcggaaggtcaaaaaatcaccctgcaaaacggcaaactgaacgtccctcacaatccgattatcccgttcattgaaggtgacggtatcggcgttgacgttaccccagcgatgctgaaagtggttgatgccgccgttgagaaagcctataagggcgagcgtaaaatttcctggatggaagtttacaccggtgagaaatcaacccacgtctatggccaggacgtctggctgccagctgaaaccctcgatctgattcgtgactaccgcgttgctatcaaaggtcctctgaccaccccagtcggcggcggcattcgttctctgaacgtggcgctgcgccaggagctggatctttacgtctgcctgcgtccggtacgttactaccagggcaccccgagcccggttaaacacccggaactgaccgacatggttatcttccgtgaaaactcagaagatatctatgcgggtatcgagtggaaagccgactctgcggaagcagacaaagtgatcaaattcctgcgcgatgagatgggcgtgaagaaaattcgcttcccggaacattgcggcatcggcatcaagccgtgctctgaagaaggcaccaaacgcctggtgcgcgccgcgattgaatacgcgatcaccaacgatcgtgattccgtcactctggtgcacaaaggcaacatcatgaagttcaccgaaggcgcgttcaaagactggggctaccagctggctcgcgaagagttcggcggcgagctgatcgacggcggtccgtgggtgaaaatcaagaacccgaacaccggcaaagagatcgtggtgaaagacgtgatcgccgatgcgttcctgcagcagatcctgctgcgtccggcggaatacgacgttatcgcctgtatgaacctgaacggcgactatatctctgacgccctggcggcgcaggttggcggtatcggtatcgccccgggcgccaacatcggtgacgagtgcgcgctgttcgaagcgactcacggtactgcgccgaagtatgccggccaggacaaagtgaacccgggctccatcatcctgtccgcagagatgatgctgcgccacatgcagtggttcgaagccgcagacctgatcgtcaaaggcatggaaggcgctatcgccgccaagaccgtgacctatgacttcgaacgtctgatggaaggcgctaagctgctgaaatgttcagagtttggcgacgcgattatcgcgaacatgtaatctggccctcagattatgtcagaacgggaacctggtggttcccgtttttattattagctttcgaacggttatcaaaattttatcaaaataagttatcaaaacccctcccgaaaaacctcataaggccaccgttgtccaccccttacctcgatcatcatggtatctatccgtttgttgttgagttttatgtccaagtaaatctttcgtgtttataccctgggctttatataaccgctcggaaagcgatctttgttcatggaaagttgccggtgtaccttgtccccagtcaatatctgcactgtctcttgccttgctgaaattcatggtcagtgttctgggtttcacctgcgctcctcgctcagcctgtgaggtggttctaaagaaatgaaccaaataagggcttactgcataatcccggcaacgactgattacatctcggaggctccagttgattgcgttgcaacgcagagctaatggtatagcgattttgcttccggttttctcttgctcaacgtgtagatgatcgtcccagatgtccgagaatttcatacgggatatatcacctagtcgctgtcctgttactatggctaaaagcatggcgttccccatgtatttgtgattttcatcggctatatcaaaaatcttttgccattcctccagagtgaggcgttggcgagtgatctttctacgaggttgtttagttgctagtgcagggttataaccaggaggtacttctcccgcatgctgagcttctttaaaaacatctattaggacagagcgaatgacctgagccattctgggttgtccctccgctaaatattcatcaagaatttgcgcaacatctcgaacattgacagcggatattaatttcattcctacacgttccttaagcagagatactggttttgctttttgtttgatagtgttttctttaatatctccggactttaatctttcctgctgaatcttccagtaacgttcaagccaggtgttagttgatattgattttcctgagttggtggatattctgtcagtgattgccattatctggcgggtttgttgttccgccagtcttttatttgcttcaatagctattgccgtggcctctgcttcatctgtacctagactatgaaacttaccagttatcgggtgcttataacgccagtatactttattaacctttctactgtagagcgggtataaatttggaatagatatattatttttacgtggtctggcagccatcgttcaaaatcctctgcaaaagaacagggtcgcttttctttactacaggagtggtcaatgtaccgaccaactcagcatcctccctgacgcgccagaatcgaccttcttttttggctgggggagaaaacatattctgtttagcataattcctgagagtggaaacacttggaggattgcttctgtatttctcgtttgcccactcttcaagggttaacatctggagcatatgttttacctcattatggcccattgctgggccagtatctgaaaataaaaaatcagttttgcatcaatttttgcagcacctgattgccggaaattattcgctgccagattgctgatacatagcgggcctgatgaatagcatcagcgagggcattgtgacgatcaccttcaaacgggatcgttgttttggggtcgaagccaatggcctggccgagctctaccattgttcgtacgtcccgatcgttccagtattcccacggataatcttcagcaatgcaatcgtaagaagaacgcagaatggagttatcgaatgacgcaccgttaccccatacctgtgcctttttgctcccgccagcaacattatcagagacaaattctctgaactggagtaatgcatccagcaacgggatagcatcatcatttacgatcgcagagcgtgcttcggaggactgcttaagccaccagataacagtagatggatcgattacggcgccccaattcacagaggattcaaggcatacgactttatagaaactttctccaatagagccggttgccgggtcaaaaacaaccgcaccaatagcgacgataggggcgttatgttttttacccatggtttccagatcaaccataacgtgaacataatcaataggctgatcttcctccttattatgaggaccggattcaatatctacagcatccgtttgatgaacaacttcatctgttttttctttttggttaaccttgccagtaacgtcaacaagaccgtcaatggaaaattctccgtccccaatttttgaaacctcaggttgccttgatttgggaaggtcttcggttacccacttcggatcagtagggtcgctaatcccttcgacatattcgccgcgctcggcggccagaacctgattagcgttcggacgctgcttttgagcttcttttacgagttcggtgccaactgctttaaagtcagaggagagtgtttccagttttgcgctgctatcctctccggcgattgcttggtttattgcatccagagtgactgcagcagatggaatatgtcccgccttggcaagcatttcagcgcttggggtatcatgcttatgttcagtcagattcgcgttgatgtagccacgcaaccgatctggaaaaggagttattccactggatgcttccctgatcagtgcaaaaatcgctgcacgggaataatcaaggatgcctggtgtgctccgtaatgctgcagaccattctttaaatggactttctttcttctgtactatttccttcgcgcggcggtggactgatgccggaaaattatagatatcaaaatccataggcatcgtcgcaagggcgatctctatatccagagtatccagcgaatgctgataatccggattgcggtcagttttgttaccgccaccagcattggcgccggtatcggttttgtttattgaggtgatatagtttccagcagcccattcctttgtaaggatcccgcggtcaatgtgcgacgtttcaagccacaatttggcgaactgaatttgcttgccgagctcatggcgtttccccacaggaaatacgctcttaaatgcactggtaaatttccacaggccaggcatatcatattttttaagttccggaatattttctgccgtcagcagcagattctgcacaccgtgattatccgtatccatttccatcgctgaaaggcggttacgatgaggaatgctaatgtgatacacgtgacgttcgtcggccatatactgggcaagcagctgcgtgcggaatgacatttccgccaggttgaagagtgcttcttcattgttcgaatagtcttcttcatcgctatttgcaggagagatatcgttttctgttttactgggggctgtggttcagcagccgccggcgcaacgattttttgccatgtcagcccgtcttcaccaccaagctcgtagcgatcgcaccaggtgtcatccagtacaccttcttccggtaagtcatcaacgatgagccagttggtgcggatcggcagctgatggctggcgccgcggccaacgttaatttcagcgtcttccaggatgtccaggattttgcgctcggcgcgagaatcggatttagcagagaaccagcagaagagacttttcgcttcgtttgcttttgccttagctttaatgagatacgggtagttgttcattgcgtttgggctcctttggattgtaagatacccggcagctgatggcagccgccctggtggtggtcattggtcaaaactcgattccggaaagctttggtcggctgaccgggtacttaacccgccttgcgcgggttttgtgctttatggggctggcgaatcgccccgtagcagctgtgatacgcgaacgtcgtcaagcgctcgcaggataggctcaaaagttttatgggctggcagtttagatactgcagtgatcacttctgtaacggtgatgtcatcgccgcgggggctataaccaccacctgggccacgctgtgaaataaccaggttacccgcccgcagctttttgaagatctgctcaaggtatgaagtagacagctttgactctttactgatggccgtcagtgaaacgggcgagccgtcatagagcttattcaaagtggcggcggcctggacagatgccagaacgcgtttcattccaaattccataatcacttctccggccgtaacggccattggtcaaaactcgattcaaaaactcactgcaggccgttggtcgtcagccattttttgtgcatttcggtaggggagacactggccctgtactttttgttcatcggcgttgctgttgcaactggcctctgatggataaacaccgatcagaacatcagagcattcaccagtgagagcacacacgctgatgacaagggcaaacagggtattcatgcttcagcctcagggtttcctttctgcgccagcaagtaacacagctggcgtagtctcacctcgaaccagttcaggcgagtcgcctggttcccggtaggtactcgggcaaaatccttcatagttatctccagttaactcagtattaggatgtggttttgcaatgcggcgccgggtgcctcccggtgacggcagccagttaacaactaccgccgacaactttttccccacaacgtgtgaataaccgccatgtttacttttttaactgtgtcgcgtgcgcatagccgcattcaccgcattgcaaaccctactagtcgtcatgcctgtcttttcaccacttcaggctcggtggtattcttggcgctctcacacagccaaataaaagagagcaaaatgtctcgtagccctatacctgtcttctggtacgaaaatcccgctcactatgaagaattccaaaaaatcctttcagatgcttacgtccttccctttgactaccacgactggcgtatccgcaccgatagcatggtggagcgctacgaaaacagcggtatccaggctgtgaaggtggtagccagcacttacgatttcatcacctggtgccaggcccatggacgtgatatcagtaccaaaagctgcaatgattacgcggtctccgaatcgggcctccaaatcctgcgcgacagagagtttgattggggagacgagtaaaaagtaaattttccctatcttggatatatctattctcatagtgatgccctatctcatgcctgtaacgccggccggcggaacgttataacctgctgcgaattcttcttgtcgtcatctcatccggtgtttcgtatgccgccggcagctacttcgtgggcttcctgcctcgatgactgaatttgtaatatcagactacaaataaatatgtcagttatcaatgtttttatgacacaaaaaatggatatgattgtttttgtgtgagatttggtgatttttgggtataaaaaaagccgctgtaagcggccttctcagtggcaagatttagtctttttcgaatggaggggggatttttcgcttactcaggaactcagccataaaccgatctaactcttccagtcgcgttctcgctagttcaataaatctgtcctgctccacttcaggaagttgatcaaatacttctaataactctaattgcttctgatttagtactgttttgctggctgtgacagcctgtaatgaagactcttcttcatccgtcataaagaaccaatacagtggttttccaagtgcttgcgggaataactctaacttttcctttcgcgggaagttacctgtattgcaccagttactgactgtctgagagtttacacccactcgccggcctaactcagattgagatataccagcctcatcaagagctcttaacagccgttcttcgaagttcatattcgcatccaaatcaaaccagtaaccaagcatacaaagtttcttagcacttgtgactgattaagtttcttgacattgacaaattatttatcaaatatgtgacaaatttttaggaggaaacatgcaagaaacggttcaaaagaaaatcatttccctttgtggcagtcaatctgaactagctcgccgtttggggaagaactctcaaacagtatcggtttggtttcgaactcaggttgcaagtactgaggtactcaacgcatgcagggttctggattggcaagtgacgcctcatgagcttagacccgatctttacccaaacccgactgacggacttccaaaggactaaacatgcaaaccatatctttcaaaaatcatacttctatgttgggtatgcaacagaaaacggaaaatcagtattcaccacggcgtcgggacagcgttaagtgccggaccatctttgcagcagttcgtgagtgggaggcaaccttacccgggcgcgcgcaggagcacgtcgcacagctggtggccgaacagtgggagaaacaagacggtcgcggcatcagcgttaataaacaaaacctgtaccgctacctgaaaaacgaatctggatcagagaagtacaccagttacgtcatgcagctttcaggagcgatcgctgatgcaatgcctattgagattgcgcgcaaacacggattgaaacgtggattgactgaaagcgagctggtggctcaagcaatcaaagagtgtagcgaagcgcaccaggcaaaattgcttggcgctccgttgcaaaagttagaacgtgaaattcgggaggcagcaattgcactttttaacatgcttcctgcagatgcggcgggaccactactggcgagcataagcgccgtagcgccacagtttttttaatcgagttttgacaatgagtaccgtacagaaaataggggggcttcatgagcattgacgcaatgcgatgggccaaaaaagtcaagacagggaagtcctctgcaaaagctgttctgacctggatggccgacatgtgcggagctgatctctgtgcttttccatccattcctgcgctggcagaagcaactgagctggataagaaaacggtccagtcgagcctgcagtatctgatctcgatcgggcttattgaagatacaggtgaacggcgtggaaagactaaacaaatcccggtttaccgacttcttggtgtggaagaaagcgttgctgaaattgaacacacccaaaaacgggaacattaccaaaaacgggatcgtttaaacattcccgaaaacggggttgttacagctgaaaaggcacccgaaaacgggactgtttcctgtacgcaaaacaaccaaacgatcccgttttttccgtcaaacgatcccaaaaacgggatccggaatctaccagaggaaccaaaagatataacccccacacatagggttctggtcgaaccagttgtgcctgactatccgaatcaaccgggaatagttcctggtgaaacacaagcattcggaaaatttgcgatgtatttcgggtggaaaccttccgaggattttccccgactgtcaacgatttggggaatgccattaagagcggggataaatcttgctgccgagttaagcagcttcatcgcgtactggcaggttgaaggcagggcgtttcaccaggtccagtgggagcaaaaactagcaagacatcttaaccgtgcggaagtccgccagaaaaaaccagcgaacgggagtaacgatcatgtgggagtacgagcagagccagcagcatccagagctgttcaacagattcgagccgcccgtgagcaacggttgcgagttgcaggaacagacggccgtagaaacggcgtggcgcctatgggaagtgatgggcgaaatcttttcgaaccgatggatcctgaagaacggagaggaaccatcagagctctggatcgctcagattgggtcgatgagtgaagcccagattacgctggtttgccggcagtgcatggagcgttgcgccgcgggcagcacatggccgccggatctcgctgagttcgttgcgctggtatctgccagcggtgctaacccgttcagtctgacatccgatgcagtgatggcggagtacaaacgctggagaaacgagtcttaccgatattcgggaagcgacaaatacccatggaaacaggatgttctgtatcacatttgcattgagatgcgcagaactggagttgagaggaacctgacggagggagagctgaaaaaactggcagaaaacttactcacgaaatggaccaaacacatggctaacgggttttcgattcccccgattcgtcggcagttggcagcaccgaggcatccagcagggccgacgccagcgcagattctgatgggagagtacaaacgccgcaaggctgcaggtttaaccaagtaaacgagttttgaccatgaccaaacaatcaaaaaccaaagtaaccaaagcgcagatggtgcttgccatcgttagccggacgccagaatgcgtcctgcaggatgtctgtgatgcgctggacttgcaagccagtacagcaggtaacttgctgcggcagctacatgccgcgggaaaactccatcgtacccataacggctgccagtacgtctatcgagtgggtgcaggcgttgaggttcccgatgttgccctgccgcaggctgcaacacaattatctgaagaagatgtgaaaaaagtccaggacgcactgtcactggcgaagatgctggaagacaaaaagctgtggcgccgggctgcgactgtttacacctcgatgcttgggatggctacaacagcaaacgaactctggttgcttgccagaatgcgtaaccgctgcctgcgcaatgtggcgaggtggtgaatatgccttaaatagaatcaacagcagctggtacgggatgtcaaagctaagtttaattattccggggtgaggcaaagctgagatgtccgctgagtgccaacaacggacattatggaaggtcagaataaaagattaaaatgggatgctgtgtgcaaaaaacgcattttttgcggttttctcaaggttttgctctgcaccttcctgggatactccaccaacagaatacgaaaatcaatattatcaacgatccggaagtgtctagattatccgtggctattcactatagggcaggatcgtctaccggggcggggtcagtccatctagggatgggaaatcccatcctaggacttatgctttatattgctttttgagatcgcttctagcatagctccactcaataatattgtcgggtcgttgctgatcaaaaaggattcgggattcaataccattacctaaaaagctggcatgcccatttacgtaagaagctatcccttgcgaaccaacatgaagaatattttctaacggttgctttgtgctttccgcattgctaagaagaaataaacttgggtacattttgttggcacggtgaaaaaaaagttcattgtcaaaacacattacgatgattattttccccgacatgatatcggagagcatttcagttggcagatgcaaactcataaatggccgagacaaagggtcaaagaatgaatcgtttatattcacaacagggctttttataccgatactatccatccatccattgaaggcaacaaaacccattccagaatcacggtacatccctaagaacaaacattcatcaatagtatcaattgcccaattttttcctccacgaataacctcccacattttaaataagcggtgggtatagaattcagacggaagatctatttcatcgattttaactttagactgatggaggttgtcaaagccctcgccagtattaatcgcctccagcacattcatgccacgtacgacttgcctttttatgcgtttaaattgcttaacatcattgccagacatattgtttttgaagttttcttcaaagtgcggacactttgagataacagaaaattcggcagcttcataaatctcattattctttttacctgttttaacttccacaagctggaagccatccagtggattaaaggtgactaaatcccccacatgaacaaatgtactcatatcagagacaattgctatggcgtgtttgtcctgattgataagatcagctgcgaccatagaatcaattatgttatcttctgatagattgtcattgactgcattaataggtaaacgccgcaaactcgagtgttcttcatcaagaatgctccaaattagtgagtcaacacaacggcgaagaataagaacttcaattttttttaaatttatttcatcaatacacttttctttctttgctttatccttgtttcgatgatgctcgttttttttaacttctaatttttttatatctctcagccgaaaaacaatttcagacgatataattttctgtgcgtctttccaatttttgaggcaagcttcatactctgtaagaaaatcctcattattagaaggtggttcttgagttggattttccccccttatcatattggcaagtgaatgcagtcgagctacaaaatgaggtgaaaaaactgtccaaaatttcctaaacggtttgtacttttcaataaaagctgattcttcagtataatttaccataactaaacatgcctcttatctgtttttctcaaggtacaatctaccaaccttatttttacataattatagttataatgtgaagtctcatttagatatcttcatacagcacgtaagaaatatttgaggctctgacatcataatcttctaagctgcctgatttttcctcacctttatataaagcaactatccatcgagcacttttttggatgcttttatttatttcagaaaagtattcaccgtcaacttcagcaagcgaatggcctaaaacgatgacctcatccacatttttaagcgacgagaaaaaaacgttctcttctttaattatgtcttcgctgggcttgaatgtattaccaaagtatttgtctatactatcgtatgcttctgctattcttatatcttgatctggtcctatatatggatttagtgacttttccaccctaaaactatgacctagtatgagatcttcatcgtaactacaattgccgtgaatatgcataatttgcgcgtctggaacggcatagatctgttgcaaggtatttgtataattaaatgaaaaatatagactttctcttggtatgggggggatgtattgttcagaattgtaagcatcggcggtgatgctaccaacttgctgatttagtgtataatggtgtttttgaggtgctcccgtggcttcagtctccgtctgctgtccctcctgttccgctactgaaggcgtgatgcgtaatggcaaaagtactgccgggcatcaacgttatctctgctctcactgccgtaaaacatggcagctcaccttcacttatgccgcttctcagcccggtacacaccagaaaatcattgatatggctatgaacggcgtcggttgccgtgccaccgcacgactaatgggcgtgggcctcaacaccattttgcgccatttaaaaaactcaggccgcagtcagtaacctcccggatacagccgggcagtgatgtcattgtctgtgcggagatggacgagcaatggggctacgtcggtgcaaaatcacgtcagcgctggctgttttacgcgtatgacaggatacgcagggcggtggtagcccacgttttcggtgaacgcactatggccacactggagcgtcttctgagcctgctgtcagtttttgacgtggtggtatggatgacggacggctggccgatgtatgagtcacgtctgaagggaaaactgcacgtcatcagtaagcgttacacgcagcgaattgagcgacacaacctgaatctgagacagcatctggcaaggctgggcaggaagtccctgtcgttctcaaaatcggtggagctgcatgacaaagtcatcgggcactatctgaacataaaacactatcagtaaattggagtcattaccagcatcggctatgttaatccctttaacccaatcagcgaattgctccttcaagcgagctgacagcatccgtgttattttatctacttcatactggtaatcgtgatgatacgcatcgctccaatcttcggtattgtacgtaactaaaaacatctcactgttttgaaggataagttcataatcaatttcacctaaagcactttctaactcattccactcgtctccagcaggtatgtattcttctatcgcgtcatatagttctttgtcattttttgctacatacgacttaaagtgtttgtatcttgtcggtagtccatgtcgaatgtcaaatccgtttcctattatgtaaagcctcatagcttttcccttaatcgaattgtaaaaagattctaaccagacctgatacccgttgactacccctcctccctttagtaatgccttcatcaaatgtaaaaacatctgcgaacttccgcagttcgctcaaagcagaccacatcctctgagcctcacataattgtccgccttgtaccaaaagcggacggcattaatctggcttccatcacatattcgaaagcattttcatgttaatgggaagcgcttaagcctatgtcaggaaaaaggaatccatattctaactttaaatttgttgatttttatgtaaaatcgtggtaataactaatgataagataatgtatcaaggaccaaattgtggccgattatataaacagcaacatattatgtgagtcatatgttcatgttgagccagaatggttgaaacaggtaagtgctgtaattcgtgaagaaaagttatcactaattagaaacgaaatagaggattttgctgacaaaagaataaaattctttttatctgatgatgttttaattgaaattaaatttactgaaggttcaattaaagcaaaggtaactgcttatggtccaattattttattgatcggttctgcaatattaaattactcaagctttagagaaagtgtgaagcagttggcctctgatatgtatcgtgcgtcatcaatgttatcctcagaaatgcttttccagacaaactctagaaacaagagtgaaatccttcgtattgaagccagaaaaggaatcgttgggtccatagagagaattaataataaaattgattccattaactctcaattagatggtaaagaactatcacccacacgtataaatagcgagttacttgatctaaatgatatgatcctaacgctactatcgaacctaaaaaacgcagaagatacaaaattagttgcttcatcattaagtgatggtgtatctaaattatcaatacgtaaatctcgctttaagctcaagaataagctcgatgaatcaatgtatgcaagcctctttaatgagaagaaaagtattattaaaaatctcgcccaatataaatgatgagaggcggggacactggtttcattcgcgtccgtatgtccactttgtgccaggagcggaccttactaagttcacacaacattgattattgaagattaggtcataaatatatacgtcattttgctaatttagttacgttggaacaccgcgctgcataaaaaataaggaataatatgactcgaagtgaaataaacgtctgggatgtgagacgaggcaccaacagtcctcgagttgaggagatccgatctgaagctcagcgcgacctttctcgattgattcactcgtctcctttcagacgattgcaatcaaagacacaggttcttggtctgggtgaaagtgatttctatcgcacacgactgactcattctatggaagtcgcccaaatcggttcaggtcttcttgctaagctaaaaaatatatataaaggtaaagaggaagcgcaatttttaccagataacgatctgatgcaagcagtatgtctcgcacatgatattggacatcctccatttggtcacggcggtgaggtagctcttaactattgtatgctggattatggtggttttgaaggaaacggccagacgcttcgcattctctcgaaactagataaatataccttagaacacggactcgatcctacacgcagacttctgctaggcatactgaaatatccggttaaatactcggaactagtggttaaaaaagacagtatcccggccactatcggatcgccgaactggctctttaagtcatctgattttaaacctccaaaatgctatctagattcagaatgcgatattgtagaatttgctctctcaccatttactgaacatgatcggaggctttttacttccgttaaagatggtgaaaccaaatccgatcataaaaaagcttcttataaagctctcgatacaaccatcatggatcttgccgatgaaatttcgtattcgctgcacgatttggaggatgctatttctctcgggatggtgacacgagcaatgtggatggagcatttcagtggacatgaaaccttatttactgactgccatggaaaaacattttccggaacatgtgaatctgtcgcggatagcctttttggtaaaagttacaagagaaaagagtgcatcgggatgctggttcacctgatgattacaagtgttgagcttaatacaaagaatgcagcattcaaatgtggcatgctcaaatataatgcggtccttccggaagcggtcgaagcactaaggttgaaaattttcaaactggtcgaaaacaaagtaattaagcatgaaaatgtacagcagcttgaattcaagggacaaaagttgattgttgagcttttcggtgtgctggctaacgatccgtgtcggtttctacctgcctcaacgagggaaatttacgagcagcagattagcttagacgagaaggctggtatgcgagtcatttgcgactatgtttcagggatgactgatggctatgcaacaaagctttatgagaagatccttatcccacgcaaagggtctatttttgaccatctctgacgtggcaagaatgatgctccgagttcaattggcctataaacattaaccaaggcatctaccagggggataacaaatcccccattctgaatttgttcgtgcagaatcggtgaacgttctcatctgagcgttaagcgccagtaatcgttgatctacactgtccattaatacaccttaatatcagcagcgtcttactccgttatgagaacaatcgcgaacttctgctgttcgctcgaagcagaccttcatctcattcagattgtccgctctgtgccaagagcggaatctggagcgccagaggtagcaacgtttcttatcaaaggtgttgatcaccacaaaaatgactgtatccctgtgatagcggatttcgtcctttgagaagaaaagatcaatctaaacatgagcatgggttagcgaaaagtggcattaaacgcttgaacatttcacctaacgagtatactgtttatttatacagtgtgcgccgggagaccggttagagatcaaggggtgaaagtccccgaccattgaaggaccagcaatccacaaggtccccgagtcatgcgttgcataccgcgaggtatggggcgaagcgttgacaggggtgttgacaggccagccattgagccacgaaatgtatattaaattaccgggtgccgacgttgtactgttaacggaaggcaacatcatagggtgcgatactgcgagtgccacatggacccggcggggtctgagaccctggcatgtcaatacgatctctacgcgggaaccgggagatctcccctctgaccatctgccagtgtcggagatggcccgcaccgggaagacgaggagtcatagccggtgatgtacggagaggagaagtcggactcgctcatagtagcggcgaagcaggcgaacaacccgaaaggagcggagtcagtggagcgaaggagcggggccaaggggaacgcggaacagccacacatgcgccggacacagagccgggaaagcatgtcacagaggctgtcacgcgtgcgggaagctgcgaagcagcggaagaaagaacggtttacagcattgttccacctgctgacagtcgaagcactggaagccgcattcctctccctgagcaggaaagcggccgccggagtggatggcatcaggtggatggactacgccggaaacatgaagaacaacataacagatctgcaccggaggctacatcagggcagctacagggcgcagcccggcaggcgtcactacatcccaaaagcggatggaaaacaacgcccgctcggcatcgcctcgctggaggacaagatcgtccagtatgcgctggtgaaaatcctgaacgcagtctatgaaaacgactttatggggttctcatacgggttcagacccgggcgaagccagcacgatgcactggacgcactggccacagggctggtacgcactaacgtaaactgggtactggatgccgacatcagtcagttcttcgacagggtgagccacgaatggctgatcaggttcacagagcatcggatcggcgaccggagggtaatcaggctcatacgtaagtggctcacagccgggacgtcggaggagggtcaatggcgagcaacggaggaaggcaccccacagggtgcggtcatctcaccgctgctggcaaacatatacctccactacgtcttcgatctgtgggcgcatcagtggcgacgtcgctatgccacaggcaatgtggtaatggtcagatacgccgatgacatcgtcatcgggttcgacaaacgatacgatgcccggcgcttccgtatagccatgcagcgcagactgagggagttcggactcacggttcacccggagaaaacccgtctgatggagttcggccgcttcgctgccgaaaaccgtgccatcaggggaaaaggcaaaccagaaacgttcaacttcctcgggttcacgcacatcagcgggaaagatcgcaacggcaggttcatgctgatacgaaagacccgccgggatcggatgacggcaactctgaaagccatcaaagacggtctgcgaaggcgctggcattactcaatccccgaacagggaaaatggctcaggagagtggttcagggatacctgaactatcactcggtaccgggcaacttccccaccatgcagaagttcaggacacacgtaacaaacctctggcgccgggcgctcaggcgcaggagccagaaggatgatacgacctggacgaaagcaaacaaactggcagccgcatggctaccaagggttcgggttcttcatccatggcctgtggagcggttcaccgccagacacccgaggcaggagcccggtgcgtaaatcgcgcacgccgggatctgtgcggggggtatccggtaacgggtatccctaccgcgacacttgcgtgaggagctagttatgaaagtggaaatcacaattgatcgccaaaaaaaattgccggatggcgctgtgcctgctctggagaaggagctactgcggcgattggatcaaaactttaataactgcagtcttgtgattcgtcggaccagctctgatgggttgaccgtgcttggaggaatggacggagataaaaaacgtattgaggaaatcctgcaggacacctgggaaagtgctgatgactggttctgttaagttgaggtccagtggcttgcctggtttattttgaggattttgctgtgagtaaaaaacaagaaatgccgaacaccggctatgcaattatcagatgcgatgatggggtgatcgttgctcgtctgacatcctttcctttgtgtgagcgcgctctgatgtaccggcgcggcgacactgtttcgtttatgcctttgcagccagatgagatcgttgggactctctctcttttttcacagatgattgaaaaggctaagtctggagttggttaccaggttccccctggttctgttacaatcccgtcataggcctgaacaacctatacctgctgcgtcacggagagaagccatgacgcaaacaactgaagtatcaaaatcccaccagactggtgctccttcaacgagcgccggtttactctcgtcttcgaaactcacttttcgacagcaggaagttttcgatctgctggtcgcctacatcaatcagcatggctacccacctacgctatctgagctggccgatatgctcggcgttagctcgtctaatgctgtcctgttgcatctgcgtgcgttagagagaaaaaatttcataaaactctctcgccgtgtctccagaggaatttccatcgtcgggcgaaaggagcctatgctcgccgtgcagctgctgcaggaaatgatagctgaagaacccggcgcgcgtgaaagagcgattgagtttttgcgactgttcggtgatcagccatgaagaaaagttggtttttacacgagcagctttcagaggctgaggctacagagctggtggagcgataccgtaaaaataactgtgtggttgagaagagcttatccagagactttgcatcgtgggagatccgcgtgttgttgccggaatcgaagaagccgccacggattgacaggacctacatacagaagatgtggagggactgatgcgagctttgcttaacgtggatattgcacgccatcttggaattgtgctgcttaagccgggtagtgaattaatgccgttattcggtgccggccgggttcttgtggaaataccgccggcaagcatgaaaaagatacccagtggacgtcttcctgatgcccggcagccgttgcgggatgatatggggatcagaccttttttcatgaagaaggcagttatcactgcagctggtggggttagtgccctcgagtcatggttgcgtaggcaggttaaaaactgtcagtggacacattccgattaccatcaccatgagctcgtcccgtttcgccattcgacgggtgtaataatcgcatgctggcactgtgataatgagctgaaaaaccaaacgggacaaaccctcgatcaactggtaggtgttaacaacgctgactgggtaatcgacactgcccgcatcgcgcttgggctggacgcccagcgatcactgtcactggcggagctatgctggtgggcggtaggcgccgggattggcgatgaaattacagaagaaatggcgcgccgatccctgcgtattaaagacgatggcattaaatcggtttacagggagagtgagatcgttccgtcggtaccggccaccagcattctttctccccgtatcgaaaaagcaatcaggtcaacggcaaaaacaacgccgggcaaacctctggttcctgtgaacgtcgatcctgttgcaccggcgacactattcgcgagacctaagcggagccgatggttatcagctgactttatctcatgggttaaaaaacagccgtgtatgtgctgcgggcagcctgcagatgatgcccatcatcttattggctgggggcagggcggcgtaggcaccaaggcccacgatgtttttacgatcccattatgccgcaagcaccaccgtgctttgcaccatgaccctgccgcttttgagcgtgaatacggcacccagccggtattgattattaaattgctggaccgggcatacgcgctcggcgttctggcgtagtaaggagaagaacagaatgacaccacgtcaacgccgtctacaccgtgcaggattagaaactgtggccgccgccccgcgcaaaagctggctgggccgattcactccccttaatggcattcagtccgcctggataaaatctctgcttactgtttggggggaagggatgagaggaggtgctgccccgcgtaaaccatcaggacattcatgctggcgaggcatgaagggtgatcactggtcagataaagcattagaacgctttacggcagcaattgagcaggcaagaagtgaagggtatcgcgggcggcaggcattaagcagggcgcatgccattttgtggccgaagcctgcaacggtcgccattgacgctgcgatcactgaggatgatgttgaatttgttgaacgatgtgtactggcgatatttgaaacgggtgatcctgtttatctcgttggcgttaactattacaccacccgcaaaaaaatctcagacataacacgggaaatacagctggtggctccatggttaacagacagtgaggcccggaaaagagtgcgctggtgccttgaaatattcagagcaaaagctttcctttctgtccataaggcgattcatgcggattagcaaaaagtgctatgttgcctttttggtattgaaaatgggccagaaagttagataattccttcatgcttggcagagctgcggcactcggcagcgacaaaaagcgacaatctgaatataacgaaaaccccgcccgtgcggggtttttgctttccggcgatacgacaggggtattcgcgagatgcgctgcatcaatacccctgtcatatcgtcgtattgcatacgcaatctcacatgcttcagcattcactgaggatttttagtgatttttttgaagatctctagggcttcggttgttaactgatcatgttcgctaaagtaactgtcacatgctgcctgcttttgagcaggggatagattagggttgcttgttaattcagcagttttagctgctatttctgccaaacgttcaaaaatctctgaaattctttggttatcagtagatagcattttacttacctcgtatttacctgatatcagtgagtgctacattgagtcagggcttcgcaatagctttaagtattagaatgcatacaatttaagtgggcgttgttggcttatattatggcagaggcgctggcggtatggtcagatattgacactttgaatgtttgcatcataaattatcgaggtggtgaatccccctatgcggaggggcgaccagtcagttacagaaacctgtaaatgcagcgcgggccatgccgactggggcatgctcaccgggaggcacccggcaccacactaatgccttaacatagtgactgtaatgacaaaagccttgctctttttgtctgtcaggctatggttaacgaacgtaacggtaaaaaaagaaggctttcctggtaaatcggtagctcggactattaggtgcaccttcctttcgttacagccttggttgccaactttcttcccgcttctctaagcgggttttttttgttcataatctagcctaagcactacttgggcttttcacatcagtaatcaggtcatggtaattggattacagcgtgctgtacttcacgtttaatctcatacgcacaagattcgcaccagactgcggttttagctcaacagcttgagcgctttaacggtaaattgaacatcacaagcgagagcacttatagattaaggcagttctttgttcccaaaggtggtagcaaaaaaacagggggaatgtttacgtatcgctacccctgcttcttgaaaagtggataaccgttaatatctttttttgaaagttttttatatccgcgtctttctttgatgtaagacatcagtgaacccactgcaactaaaagaagaacaacagctaacgctagcatcattatggttgtcatgtgagcttatcctctgaaagactatggatattgtggttcgcgtgaggcgtagtgtgcgagttaagtgagaaaattcctaacagtatttatttcttaatttgataacagatatgaaaatttattgttgtttttgtaatgattaaatatgcagtgattaattattgcccgctaggttatacagtttccgaaagatgtattttactggttacattgaattgaccaggcgcatatcgtgtagctaatgtgggtgtgtggtgaatccccctgtgcggtggggcgaccagtcaattttttctttgagcacacacgcgggtctgttgactggggcagacttaccgggaggcacccggcaccacacatactgcataaccccctaaaggccttccattgcggcaggccttttatcttgccgatgccagaacgttaattttctgccagtaagccgagacccgtctaacaggtattcatcggccgcattgcctaatgggcttacttctctaatctatacgagcgcagcagtggatgcattaccagagattatgatgatgtaaagcctaagcggtgggaagtttgtcttgagtgaaaatcttactacagtgagggcacatcagcgcagagcctttctggactcgggtgtaactatgttctgattggttggtgcagctagggcaggtacatttgatgaggtagttgcgattgttttttgagtttttgcgttgttgcatatgatatttcctaatgaatggtccgcaacaatacactatccccgggcacatagctcgcgttgaattatctagccacctattcagggtggttttttcattttcaggtacctggaatcatcattgataagatttcctcctgccggtcctgaaccttatcaaacacaaagcaccccgttaacccggaggtggagtatgtatcgaatggacaagctaacaacaggtattgcctacggaacgtccgcaggtaacgcggggttctggatgttgcaattgctcgacaaagtatccccatcccagtgggccgctattggtgttctgggaagtctggtatttggcttgctgacatacctgacgaatctgtacttcaaaattaaagaagaccggcgaaaagctgctcgaggtgaataatgtctccgacactacgtaaaactgttcttgcggcggtgggcggcggggccctggcgattgcctctgcactcatcactggcccgatgggtaatgatgggcttgagggagtgcgatactccccttatcaggatgtggtaggtgtctggacggtttgctacggccacgcaggtaaagacatcatgctcggcaaaacctataccgaggcagagtgtcgggcgctactaaataaagacctgaataccgtcgcctggcagatcaacccttacatcaaaaaaccgatcccagaaacaatgcgtggggctctgtactcattcgcctataacgtcggagccgggaacttccagacctctactctgcttcgcaaaatcaaccagggtgaccagaaaggtgcgtgtgatcagctgcgccgctggacctatgccaaaggtaagaagtggaaaggacttattacccggagggaaattgagcgtgaagtgtgtttatgggagcaaagatgagtcgcttaaccgccgttatcatcgcaatagcaatcctgctaatgtcctgtgccatttcatggcgtatgggatggagttcccacgctgatcacatcaatgctcaggctgcgaagaagagagagaaggccgagaatgccattaagcctgtagaggaaaaggccgcgactgctaacgaagcgggtaaggtcatctacaaaacaataacccgcgacgtggtgaaatatgttcagtctccgaatcgtactgtgtgtaggtttgatgatgctgctgtgcagttgcgtcagcgcgccatcgatgctgccaactccatccccggatttgatgagtccgccgtgcaaagcaagtgacgcagggaatgacagcgatgaagatttacagtctgatgtagaaaccgctcaatgcctgcgccagctccgtttggataagtatcgctggcaggcgtactatcgggcgatgagtaagtaacaggcatagcacatgaaataagtggccttaagtgaacaaaaaatctgaaaacaagacattcaagctttcagcatcgaaatgtttgtatctaattcaggggatgtcatgcactataggatctcaaaccactctaaactaagtagccactcatgacagtaaacttactaccacaactaccatgcggttatcgttacggcattgagcgctcgatccggccccagactggtgcggaattttttccgccacaagggtgtgttatcaaatctgttaactttggggatggtgtggttatttgtgtgcccatccaatggtacattaaacaattagatttatgggtcactgtctaaggaaccatcgaataatatgttagttaccagcctcgttagggcgaactgataattgctctcaaaagaccagcatagaagcctgttgctctggttgaatgttccggcaagttgaaaatgattggttcaatgagctctttcgatatttaaatgctatcgataacttaaatgaagctatcatctcgttatcactgccagccaacaccgaaacggcagtggtcagttaaaaagcagaaaagcctctcttgggtggctcctgagagattttagttttctaactggtactaaccaaaggtcgcatatctatgcggccttttttttagccggtttcatggcttgaggacatcctggacgagaatatgtgacaaaaccaatcaggggaaacaggaatgccctgtgagcggatttacgaatcggtgcgaacgtctatcccctctaagggataaaaaaacgatatcccttttaatagataatgaggagaagcaacttgaaaacgttgaaagtcactattacaaaccttcaacagattaatgatggcattgtctgtggggtcaaagtcagatttaaagtcattcagtctggttgcgtgctggtcgagaaggttatatcaggcaaggctaccgctccgtttaccttatcttatgatgtcaatgcgaatgatgaatctctggtggtggaacatgatcgcccagacctgcaggagcttgtagtctcagcggcaatttcctctgcagagtgttataaaccggataataccctgacctctgtcagtgcttggagcattcaaacgcagggtaagatatacgcttcaggtatgcagccaaacattgatgaggtattcaaacggttagatgctgctgaggcactactacactttatgggctgtaagattgcggaactacaattaagatatcgaaataaataatagatcggcagacagcctgtaaccgtctgccatagctattaaggtcggttatggatatgttggatttgctttagcatctccaagtttttctggttgtattcatcatcaatctgcgaaagttgatgtattacgacacccttcatatcctgatcaaggcaaacaaacatagttgccagaagacctttgagagctcttatttcttttgctgcagactccagagttgagcaatccacctcgatgttatatttaatttcttcttccattttaaagttccttaagcagagctaatcagccattcctctgcaagtacaatatttaactgtgtcccaccacagataggctgagccgcaaccttacactctgagctttcacagtaacaccctgatatttaaccagtagcctcgcatctgcggggcttttttattcgcaaaaggtaacgcgatgaagaacttaaaaattgcatacgtagacgagaagctggtggcgattgagtgtgacggattgtcatgctcatcgctgcccgtttcagagtttcccatcgacagtgccgctttaactcttctccctcaactcatgctcgaggatgtttatgccgccacgagctaaacgaccttgccggcacagaggatgcacggctgtgaccaatgatgtcggaggatactgtgagatgcataggcagcaacacgctggtgatggctggcgtaactatcagcccggaaaaactcggcaggaacgtggttatggtcgaccgtgggaaattaaacgggcccgtatcatgaagagggataaatacctttgtcagaactgcaggcgagacggtattgccacgaaagcctcaagtgtcgaccacatcattcctaaagctcatggcggtaccgatgatgactttaatctggagtcattgtgctggacctgccacagcaagaaaacagcaacagagagaacccgatgaagagtttcaaaattgaatacgttgatggtgttttgaccgttctggagacggatggtcagtcacgaatgaatgaagccgtacatggcatccattttgagcatgtccagggcggccgcccactgctgaaactgacgattgcacatgatattgctccggcccctgtttcatcacctgcactggatcaggagcctttagagggggagttggtgcaggaacaacagacaatggttcccggtggtcgccgttcacgtcatcgtcgtggaggtaagcaatgatgtatcaacgcacggatctgacgctttccatgttctatgcatccagcgctgatgcagacgggaacaaagtggctacgttgacgatgcaggtcatcgctgcagaggctggggccgtccagaccagccagctgcgatgtatcaccgatagcgcgaagaaaaaaacgtatagcgtaggtgaacaatctgtcagtaatggttccgatccgttgctggtcgcgattgagaattactggcgtcagagtacggatgtcgtcgttaaaggattgatcgccgaggtgaccgacttcatcgcagggaacatcaactcagtcagcacctggatcggtcagtttggcatgaaggtgttcgagaaccagccattagatgaacggctaccagaaagcgtactgcaggccgatggaggctccgctaccgagacaggatcctgatcgccggtataacaactggtgttcattgaacgtctgagatacgccggcccacgcaatgcgaaccgtattcgccgccggcgcagccggaatgacgacctccacctcgacagaggcagctgcagccaggggtaggggggagcaaatccctgacccctttcgcgcttcgggactgcccgttgaagtctatttttacacgccagaaataagaaacttttttccggaaggtttcatctatcaaaggaacgtttatggccggaggaattcgatcgtccggtggtggccgaaaacccactttacccaccgggcaaaaaagcaaattaacacgtattgcgcctcccgctgagttaatgggggaggcggcaataagaatgtggaagacgcaaagcaaaatactcatcgaccgaggggtgtttgagctggaggacgcacctttgttactggcttactgcaatgcttttcatctgatgctcgaagccgaaaaaatgctggccagcggactgacctcagaaagtgaaatgggggggctgaaaaaacaccctgcagttaatgtccggaatgactcggtttcccagcttgcccgactgggctctctgttggggttagatccgctcagtcgtcttcgcatgaccagcggacaaaaggatccggacgatgacgggaatgaattcgatgagtttgactgatggcaacctatccgaacgtcaatgcagcgaaccagtatgcgcgggatatcgttggcgggaagattctggcgtgtcagttaacgatacttgcctgtcagcgacatctggacgacctcgaacgagcaaaggatccccactggccctaccgcttcgataaaaacaaagcagaacgatttcttcgttttgcccagaaaatgcctcatacctcaggggaatgggcccggcgtaaactccggattgaatttgaagcctggcagaagttcgctcttggcgtaccgtttggatgggtacacaagaagacaggcctgcgtcgtttctctgaaatctatatcgaggtgcccaggaagaacgggaaatccgctattgccgctgctgtaggaaattatatgttttgtgcagatggcgagcatggtgcagaagtctattgcggcgccacgactgaaaaacaggcatggaaggtattttctccggcgctgcaaatggtgaaaaagctgccggcattgcggcaaaaattctcgataaaaccctgggcaaaaaaaatgacgcgccctgacggttcggtttttgcgcctgtgatcggtgacccgggggatggtgattcgccatcatgcgccatcattgatgaatatcacgaacatactactgatgcgctttacaccaccatgaccaccggtatgggggctcgtgaacaaccgatgacactgatcatcaccactgccggctatgacattacatccccttgctatgaaaagcgtactcaggttgtagagatcctgcggagaacccgtaatggcgaggaaaatgaaaccatatttggtctgatttatggccttgatgacgatgatgactggacgactcctgaggcattaatcaaggcaaaccccaactatggcatttcggtaaaagcagattttctccgggctaaacaattattgggtatgtcgacgcccgggcagacaaacaagattctgaccaagcatttcaatcgctgggtaagcgcaaaatcagcttattacgacctgagaaaatggatggatgcagccgataaaaaccttaagttgtcagattttgaaggggaagaatgctggctgggtatcgatctggcctcgaaagttgacctcaatgccgtggttccagtttttcgtcgtgaaatagacggaataacacatttttactgtgtttctcctctgttttgggcaccagaagaaaccatttactcgcaggagaccgcgctgaaaagtaccgcagaacgttatcagtcctttgtccggcagggtaagttaatcccgaccgatggtggcgaagttgattacaggctgatatttgaaacgatcctgaagctgcggaataccgtaaaaattgcccaatgccccattgatccttatggcgcgacttcattacgtcacatgcttgaggaagaggggcttgagcctgtcgagataagacaaaattttacccatatgagtgatcctatgagagagattgaggctgcgctcatctcggggagattccatcatgacggacaccctgtcatgaactggtgtatttccaatatcgtcggccagtaccttcccggaagtgacgatattgtgcgtcccgggaaagaagggcggcagaacaagatagatggtgcggttggtttaatgatggggctggggcgcgccatgcttaacagttcagtgatgacatccgtatacgatgaggaagatatagcatgctaatttcagttctgagttttattgtcggcctcactggtgctggattgttatccgcaggtgcctggcttatttctccatcagtgggattgataacaggagggattatttgtctgggctggtcatatatgacaacccgggccttttcctccggcgtcagcaatggcggaggtaaataatgttcctaccccagatgttcaggggccgacaatactcgggtaatagcttctgggaagccatgctgggcggggttcgttcaagccagagcaaaactggcatcataatcacgccggaaaccgctcttggactttcagcggtccgggcctgtgtcaccctcctggcggagtcagtcgcgcagctgccgtgcgaactttaccggcgggataaaaatggcgggcgccagcgtgcgacggaccacccggtttatgacctgattcactcccagcccaacaggaaagacacctcattcgagtatttcgagcagcagcaggggttgctggggcttgagggaaattgctactcgatcatcgaacgggacggaaaaggctacccgaaagagctgatccccattaacccgaaaaaggtcattgtgctgaaagggccggacggtatgccgtattacgaactcccggaagtcggtgaaattctgccgatgcgcatgatgcaccatgtgaaggtcttttctctggatggctatatcggcagttcccccattcagacgaacgccgatgtcttggggctgaatctggccgttgaggagcatgcggcagcgacatttcggcgtgggacaacgatgagcggggtgatagagcgtccgaaagaggctgcgaccattaaaagccaggatgctattgatcgcctgctggcgaaatggaccgaacgccattccggtattcacaatatgttctctgtggcactgctgcaggagggcatgagctacaaacaactgtcgcaggataacgaaaaggcgcagctgctacagtcgcggcagtggggcgtggaagaggtctgccggctctataaaatcccgccacatatggtgcagatgctggcgaaagcgaccaacaacaacatcgagcaccagggcctgcagttcgtgatgtatacgctgctggcctggctgaaacgccatgagggtgcgatgcagcgcgatctgcttctgcccagcgaacgccgcgatttgtacatcgagttcaacgtttccgggctgctgcgaggcgaccagaagtcacgctatgaatcgtatgcgctgggccgccagtggggatggctatccactaacgatatccggcgtatggagaatctgccgccaattgccggcggggacaaatacctgacgccgctcaatatggtcgacagcgcgaagatccttcctggcgataagtcgccgacagcaaaacagctggccgaaatcgaaacccttctggccagagcctgattatttcccgccgcgcgggatgacctggaagacaacatgacaacgaaattaattaacctgccgcacctggcagatatggtctttggcgtgccgcattacgtgacgcggcaaacaatggactccgtgaaagcggtgctcatcccccgtattcaggggatcaccgaagatgccgccattcagatggcattgaatccgggtaaatcacctgctgctgagcaggtccagcccaccggcggggtggcggtgatccccgttcacggcattctcgttccacgccgggggcagattacggcgatgtgctccgagctgaccagctacgagcggatccgcgggcagttgcaggctgcgttaaacgacccctcaatcagcgaaatcgttctggatattaactccggcggcggcgcagcggtggggtgcaaggagctggccgattacatttatcagtctcgcgacacgaaacccatcacggcgattgtgaactacagcgcgtattccgccgcgtatttcatcgcatcggcctgcagcaaaatcatcgtcagccagaccagtggcgtggggtcgattggtgtgatcatggagcacctcgatacgtcgaagatggaagaaaaaatggggctgacgttcaccaccatttaccggggagataacaaaaataacggcacccaacatgaaccactgagtgaagagtcgctgggtatgttccagggcatgatcgacgaaatgtacgagacgtttacggggtcggtggccgaatatcgcggcctgaagcagcaggccatcattgatacgcaggcggggctgtattttggccctggcgctgtgtcagccggcctggcggatgaagtctctgacccccaggcggcgatcaatgctatcgcggcaaagtatcagcaaccccgtcaaaaaacctccattcagatgcaggcagccgcgatggacctgcaaaccaaaatgtaacccggcgcaaacacaaaccgcgtcaccttaagcagccagcaggctgctttttttatgtctaaaaagagagaaataaaatgccacatattgaagaattgcgtcgtcagcgtgcgggtatcaacgaacaggttcaggccctggcaaccattgacgccagcggcggcacgctgactgcggagcagctgacggagtttgcgaacctgcagcagcagttcactgatatcagcgccaaaattgaacgtctggaagccgccgaacgtgctgcggcgctggtcgcaaggcccgtgacagcgactcagcaggcccccggcattattgttaagcaggagccgaaacagtacaccggtgctggcatgacccgactggtgatgtctgtcgccgcaggcgcagggaatctgcaggacgcggcaaaattcgcttcagaagagctgaatgaccagtccgtatcgatggccatttccaccgctgcgggttccggtggggcgctcatcccggagaacatgcaaaacgaagtcatcgagctgctgagcgaccgtaccattgtccgtaagctgggtgcccgctccgttccgctgcctaacggcaatctgacgttaccgcgctcggctggcggtgcaacggccagctacaccggcgaaggaaaggatgccaagacgtctgagtcaaaattcgacgacgtaaaactgagtgccaaaaccatgatcgccctggtcccgatgtcgaaccagctgattggtcgcgccggctttaacgttgagcagctggtcctgcaggatattctgaccgccatcgctgttcgtgaggataaagcgtttatgcgcgatgacggtaccggcgatacaccgattggtatgaagtcgcgtgcgacgcagtggaaccgcctgctgccgtgggaagcgggttccacgatcaacctgaacacggttgatgagtacctggacaagattattctgatggcgatggatggcaacagcctgatgatccgttgcggctgggggatgtcgaaccgtacctatatgaagctgtttggcctgcgtgacggcaacggcaacaaagtctacccggaaatggcgcaggggatgctcaagggctatccgattcagtataccagcgcgatcccggttaacctgggcgaaagtggtaaggaaacggaaatttatttcgccgacttcaatgatgttgtcatcggtgaagatggttccatgaaggtcgatttctccagagaagccacctatctcgatgcagaaggtaacccagtttccgcgttctcgcgtaaccagtcgctgatccgcgtcgtcctcgaacacgatatcggcttccgtcatccggaaggcctggtgctgggtaccggcgtcctgttctaacccacccctctgttaataaagcccgcatatgcgggcttttccctttaaggagaatgttatggctgcgaaaaataaagcagtggagccggaagaaacggccggacaggacaaccatgcgaccgtggtcgcacaggacaaccattcgtccgagaccgcacaggataaccgtgcgaccgtggtcgcacaggcagaacgtaaatccgttgtgttcctcggtccgcatagccgttattcccgtggtgatatcgcgtggtttgaaggatcgcacgccgaagagctggttaagcgccgtatcgcggtatggccgaaggatgccgaacgcgcgctgaaaccgaagccgggagacagcgattttgatactgacattggatgatgtgaaaacccagctacgcctggaactggacttcacggagcatgacgccatgctcacgcaaatggtgaacgccgcgcagcggagcatcgagcgtgattactactgcaagctggtcaccagcgatgaagagctgcaggcgctcccggagaccgtccgcggatttatcgcggatgaagatatccggctggctattcagtttctggtcagcgatgcgtatctgaatggccataccggacagtggctggaaaccgctgcggtgaggcatcttcttttccccctgcaggagcatacgctatgagcctgaaaccgggtgatatgaactgtcgcattgcaattagctacgttcagtccggtcgtgggccgctgggcgaaccgctaccggaaaagcaggttgaatcgggaaaagcgtgggcaaaacgggagctggtatcggggcgaaaagtccgcacgctggatcagcagcaggtggtggaaacctgcctgtttacggtctatccgggcgtgctggttgatattgactggaaaatcacgacgaaaaatctggtttataccgtccggaatatcgaccgcaaaacagaccggatcattatcacgggggaggctgacgggcggcatgatagagctggcgattaagggtgcgctggagcgcatcaccggcatgaatgcgtatccgcttttactgccggacacggtccaggaaggtgcgacctttcagcgtatctctgacccggaaatggtctcgggaatgttgcgaacggggatcgtctctgcccgtatccaggtgaatctgtaccgtctcgatgattacacctcactgctgcagctggataaaaaaatctgggcggaactgaagtccgtcgttcatggccagctggagggtatcccggttcagtatgtggagcgaggcggtatccatcaggataaaaaccagctgacgaatcgtcgcattcagtatcgcctgacccgcgatttcatcattcactacgtggaggactcctcgtgatccgaatggaagttaaagggctggatgagctggagcggcagttaatggccctgggcgaaaaagtggcgacgaaggtattgcgggatgccgggcgcgaagcgctaaaggtcgtcgaggaagatatgaagcagcatgccggctttgacgaaacgtctgccgggccgcacatgcgggactcaatcaaaatccgctcttccacccgcaagggtaaagggaacgcggttgtaacgctccgtgtcggccccagcaagcagcaccatatgaaggcgctggcgcaggagcttggcacggttaaacaggttgcagacccctttatccgacccgccctggattacaacctccagaccgttttgcgcgtgttaaccgtggaaatccgaaacggcattgaaaacaggtagcatccgctgccgtataaaaagagagagaaatatggctgataaaacttcgcctgaatatgcgatgttgccggcgggcaccattgtgaaatacggggagcctggcgctgccacgtcagcgctgaaaccgctgattaactgtaaagcgtgggtgcaatgggacagacggggggctttgtcgactgcaccacgttactggataagcagaaacagtccatcagcgatctgcctgacgggcctgaaaagtcgctgggcttcattgatgatccgggcaataccgattttgccgcgctgctgaacgcagcagaggcccgcaagaccatccagttatacgtcgaattacccaacaagcgaacagcgacgatgctcctggcgctgtccgggtggcagatgaatgaaatcgccgctccggcgaatgaggtcatccagatcactgttcagggtaagcagaacaagatcgcctggggaaccgtcgctgtctccggcggcgcctgattaacttaacctttaaacagccaccttcgggtggcttttatttttaaggactacctgtgaaagataaagattacctgtccacgctgaaatccgcgttgcttaaatcggagccaaccgtcattaaaaccgagttgtttggcgccaccgtattcatccgccgcctgaccggggattacctcatcagctacgaagagaaaatggctgaaaccgcaaaagctggcgcagcgcgcgaggcatcggagcaagtcatccagatcgtcatcgatgcactggttcagccggatggaacggccattccggatgagtttaaacccacggcagccgagctgctgaaggcccatgaaaaccccgaactgctggccgcagtggaaaaagtgaagcaacacgcaatcggcaagctggaggaagcggaaaaaaactgagtgactcgccctggctggagctgattttctggctggccgaccgctggggcgagcctgacccatccaaaattgccgcattgccggcaaacacgctgtaccactggcgagcctacttcctgaaacagggcactttccgccgtcctggcgatgaaaacgcgccacctaccgaaaccacacctgcgccatcccgggtcgatgatgaatgcgcggcagtcatgagggcattaatgtaatggcagacgtcgcatctttagcggtcgggctgcacctgaacgcagccagttttaaatcccagctgctgggagcgtatggcgatgcggagaaccagtcacgacggtttaaccgtaatgcccaggcggacgcgaaaaagacggaggacgcctataagaaggtcggtctgtcgatatccgggatggccagccggctggcggggctggcaggagccggcctttccatcggtacgatcgtcaccacgtccagacaatatggacaggcattatcagacctgcaggccatcaccggtgcgactgctgctgaaatgaaagcgctggatctggctgcgcaggaaatgggacgcacgacagagtacagcgccagccaggccgccgaggcgctaaagctgatggcgtcggctaaaccggagcttttaaaaacgtccgatgggctgcagaaggcgacgaacagcgcgcttatcctggcgcaggccgccggcacaacgctgcccgatgcgaccagaacgctggcgctctccttaaaccagtatggggcgagcgcgcaggaggcggatcgttatatcaacgtgctggccgccggcgcgaagtacgggtcgtcggagattgttgatacggcggctgccattaaaaatggtggcgtcgcagccgcacaggccggcgtaggttttgagcagctgaatgccgcgattcaggtgctggcagagcgtgaaattaaaggcggtgaagccggcaccgcgctgcgtaacgtcatcctgaatctggaaaagggcacggacaagagcctcaagccgtccgtggttggtctcagccaggcgctgaccactctttccgggaaaaatctctccacggcccaggccgtaaaactgtttggcgtggagaacctgaatgcggcgtctatcctggtccagaaccgttcaaagcttgatgagctgaccgcttccctgaccggtaccaaaacggcgcatgagcaggcatccatcagggttaacaacctgaacggcgatttgctggggctgagcagtgcgtttgaagggatggtcattaagatcggccagagcagtaacgggccactccgcagcgggattcaggttgccacggaggcactgaacagcctggcagacaatttcaacaccgtctccagcgtggcgctttacagcctgatccccgtgttatccacgaaactgactgcagggctgcgggagaatatcgcggcctggcgggaaagccaggcggcggtaaaagcgcgggcgcaggctgatgcggatattgcccgcaaaacgctggattcgacagcggccatcctgaaacagaacgacgctgagtttggccactaccggcagatggagcggacggctaaacagtacgggatgaatatcagttaccaggatgagtttacccggcttatccggcaggaaactgagcaaacgaacctggccagccaggcgaaactgaaactggcagcggcaaaccggcaattgtcgatatcagcccgtgcggcctccgttgcggtgggcctggcaagaggcgccctggcttttgttggtggtccggttggcgcggcgacgctggctggctctgcattactgtatttccatcaacaggcaaaagaagcccggcaatcggccattgatttaaaagatgccgtagtggaaaccagtgaagcgctgatgcgcctctcgcttaaccagttaaatgtgaagcagttcgacctggaggataagtacgaaaaccaggtcgtgcagcgtaaccagctgataaaagagattcaggatgccgacagtcgtatcgacagcctgaaagggtttgaccccttcggccagctggaaggggtgacaaaagaccagacgcgggcgcgggcggatctcgatagcgttaacgagggactccgcaaaaccgaggaaaacattaagcgtgtcagtgatgcaaaaacactggctcagctgggtttatcgggaaaaataacctcccttacggacgatctgaaaggagcgttaagcacgccccccaaagagaccggagatggaaatccctggggcggcgatggcggtaccggcacggggaaaggcagtaagtccaggtcgaccagttcaaaacgctgcggcagcaaattgaagaagcccatgcgtccagcctggccagaattaacctgcaggaaaaggacagcaacagggagctgcaggaagcggcgaagaaaaatggcgccagtgatgctgacctgcagcgcgcgctgttaatgaatgcagagaactaccagaaacagcgactggatctggctgcgcagtattcccccgcccggaaactctgcgaaaagagcaggaagccagccgggacctggctgagcttttcaaagcccgccttcttgatgaaaaagagtaccaggccgcacgaataacgctggccagagatactgcgaaagagctgctgcaggcgcatgccgatgaaatcgctgcgccggcactggatatcgccggcgaagttgatccactggtctcgctgcgcaatcagcttgcgcagcggcaggcattgctgcaggcgtactaccagggcagcgcgatcagcaaagaacagtacgaaatgctgatgcagaaggcgacgaaagaatccgccgatgcgcagtatcagacgtcactggagttataccgatcacagggagaattccagagcctggccgtcgggttattcgaaacggcccatgagcgctcaagcaacttcctgacgagcatgctgacgcggacgagaagctttaaggagaacatggctgacctgttttcctcgctcacgcagtcgatcataaaaaacctcgttgatatggccgctcaggcgctggtcaccagtactgtcatgcaaaccattatgggcgtggtgggcgtcgggagcgttgtcagggcgctgcgggcgcaggctcggcggacggcgatccagaatgccgccagtaacttccagttcaacggatccaaaggcggcgtcttacgactcaccgtcgctgagcgcatacagcaaccaggtctacgactctccgcagttcttcgctttcgcaaaaggggccggcgtatttggcgaggccgggccggaggccatcatgccgctgacgcgtgccggcgatggttcgctgggtgtacgcgctgtcggtggtggtcagaacgccggcgcgtcggaagggccaaaagtctatatcacgattgaaggcggaaacacctcaacgcaggcgccgtctggttttgagcagtttggccagcagatcggctcgtttgtggagaaaaaatacagggagctgatggcgcaggatatgcgccctggcgggatggtctggaatgcagttaaagggcaacgttgatggctattgagatattcacctggagtccgcgggttaatccccagcagaccgttaactttcgtgtccggaaggcacagttcggtgacgggtatgcgcaggtatgcggcgatggtattaacacccgatcacaggactgggagctgagttttgtcggtacggaggactatatccgtccgattaagcagttccttgaccgtcatgccggcacccgcgcgtttcagtggaccccgcctctggaagaggtggggcttttccgctgcgaacaatacaaaccggttccgctgggcggcggaaattactcactttcagccacttttattcaggcatttaaaccatgagccttaacgcgaattatcagaagttagagccaggcgatgaagttcgtctcctggagatcgatggccaggcgtttggcctggacgaggttttgtatttccacggctataacgttccccatactgcagccgaaatcctcgccgctggcggcgacctggataagctgccggcgaaaagcatctggtggcaggggcgggagtataaagcctggccatgtgaaatcgaagggatcgaatcctccaccacgggcagtgacgcgcagccaacgctgcgggtagggaacatcgacgggaagatatccgcgctctgtcttcattacgacgatctggctctggcgcgggttgtcatccacgacacgcaaaaacagtatctcgatgcgaagaactttccggacgggaatgcctcagctgatccgacgcaggagaaacggcgccttttcttcattgacgtaaagcattatgaagacgatgagaaggtggaatttactctctccagcccgtttgccctgcaggggatgatgatccccactcgccagctgcatgcgatttgcacctggtgtatccgcaatcagtaccgcagcggtaacgggtgcgactatgccggcacccggtattttgacaggaacaatcagccagttgatgacccgtcgcaggatgtctgcaacggcacgctcacggcctgtaaattacgtcatggtgagaatagtgaactgccgtttggcgggttccccggcacctcattaatcaggagctgatatgcgtcagaaaacgattaaggccatccaggaacatgcggccgcagaatatccgcgcgaggcctgcggcctcgtcgcccagaggggccgagcggagcgttatttcccctgccggaacctggccacagagtcgaaagataattttgtgctggcgccggaggattatgcggaggttgaggaatggggaacgatcaccggtattgttcacagccatcctgatgccaccacccagccgagcgaactggataaagcgcaatgcgacgcgacccttctcccctggcatattatcagctggccagaaggcgatctccgtaccatccatccgcgtggtgagttgccgctcctcgagcgaccattcgtgctgggccactacgattgctggggcctggtgatgagctattttcggcaaacccacggcatcgagctgcacgattaccgcgtcgattatccgtggtgggaaaaggagtatccggacaatttttatcaggactgctggtatgaatgcgggttccgtgagtttgatggtccaccgcaaccgggtgatatggtgatcatgcaggtgcaggcggataagtggaaccacgccgggattctgctggaagggaatatgctgctgcatcacctgtatggccatctcagcaagcgcgtgccgtatggtggatactggttagataggacgatgaaaatcgtccgataccattctctgtgttaatctcttgtggaattttaactataaatccaagggacactgaaatgaaaaaaatagctctagcattggcaattgtcacagtaacaggctgttcgacaacagttgtacctcccagccaagctatttccgcctcaaaagagcatgtttttaaatatcaagaaaacgaaggtaataacggtagcctgacaatcgttcgtgattcaggattcgtgggggcaggatgctatgcaacagtttatttgaatggtgaacgagtagcgaaactggatccgaaagaaaaagcgacattttatttatcagaaggagagtgggctgtcggtgctaatcttgaaggtaaaggactttgcagtttaaaccgagagaggcaagaacgatttttcaatattaaagctggagagaaaaaagcagcaagagtttttacggatgctaatggcgatttggatataaggccaaccactattaattaactcgtttcccaccaactggagctattatgcaggaaataatgacaagaattgagctttctggaattcttggcaaaactttcgggaaggttcatcatcggttgatttcaacagtccaagaagcaggcatagcgctggctgcaaccatccctggatttgaaaatttcatgaataacagcaaagaaaaagggttgacctttgctgttttcaaaggaaagaaaaatatcggtaaggatgatttaggattccccgttggtggtgaagttatcagaattgttcctgttttaattggtagtaaaaaggcggggctgcttcaaacaattcttggagcagttattattgttgcatctgctgtcggctcttactttgttcctggcaaccccgtgtcagcatttggttataaaatgggggctgctatgatgctcggcggcgtcgttcagatgctttccccacagcccgctggcctggcacgaaaagaatccgctgacaataaagcgtcctacgcctttgggggcgtgacgaatactgcctctcagggatacccggtccctttgctttatggcaaacgccgaattggcggagccattatatctgccggtatttacgtagaagaccagcaataagttttattcagtaaaccatccaattcaggccaccttgcggtggctttttttatgggcgtaatatggcaaataacataattaaagggcgcaagggtggcggctcaaagcagcgtacaccgacggaacagccggatgatttacagtccgttgcgaaagccaaaattctgctcgcattaggtgagggtgaatttgcaggtggtttaaccgggaaagatatttatcttgatggcaccccgcttgaaaatgctgatggttcgcaaaacttcagtggcgtgtcctgggaatttcgccccggcacgcaggctcagacttatattcagggtattccaggtactgaaaatgaaatcagtgtgggaacggaagtttccagcaagacagcctggacccatacctttactaatacccagctttctgccgttcgtgtccgcctgaaatggccgtccctgatgaaacaggaagatgacggcgacgtggtgggcaataccgtcaagtatgcgattgacctgcagaccgacggcggcgcctggcagacggtgctggaaaccgcagtcacgggtaaaaccacctccggttatgagcggagccatcgtattgatctgccccaggccggcagtacctggacgctacgcctgcgtaaaatctctccggatgcaaacagtgtcaaaactggcgacgtgatgacgctgcagagctataccgaagtgattgacgcgaagctgcgttatcccaacaccgcgctgctttatatcgagttcgactccagccagtttaatggctccattccgcaaatttcctgtgagccgcgtgggcgcgtgattcgtgtgccggataactacaatccggaaacccgcgaatataccggcgtctggaccggcgggtttaaatgggcctggacggataacccggcctggatctattacgacattgttatagctgaccgttttggtctcggtaatcgtctgagcagcgccaatatttcgaaatggacgctgtaccagattgcacagtactgtgatcagctggttcctgacgggcgcggtggtgacggcatggagccgcgctatacctgtaacgtctacgtccaggaacgcaacgatgcttacaccgtgctgcgagactttgccgccattttccggggcatgacctgctggaacggtgagcagattgttgtgcaggctgatatgccgcgtgatgtcgattttacctatacgcgcgccaatattatcggcaaaccccgttattcgagcagcagcagccaggttcggtacaccaacgccctggtttcctggtctgatccggataatgcttatgctgatgcgatggagccggcgtttatcccggaactggtttcccgctacagttttaaccagctcgaactgaccgcgattggctgtacgcgccagagcgaagcccaccgtaaggggttgtggggcatactgaccaacaacaaagaccgggtcgttgagtttgatgtggggctggacggtcgcattcctcaacccggttatatcattgccctggcggatgagttgctggccggacgggtcaacggcgggcggatcagcgcggtgaatggccgggtgattacgctggatcgtgatgtggatgccaaacctggcgaccgcctccagctaaacctgccatccgggatctcacagagccggactattcaggctgttaacggacgccggcagattacggtcacaacggcgtacagtgagacaccagaacgggaatgcgtctgggccgttgaatccgatgacctcttcctgcagcagtaccgggttacaggggtaaaagagaacagcgatgccaccctcacgatcaccggcgtggcacatgacccggataaattcgcccgcatcgataccggcgctattatcgaccagcgcccggttagcgtattgccggcgggcaaccagtcacctcctgacgatattgtcatcacatcccgctcggtcgtgaatcaggggatcagcgtcgaaacgatgcaggttaactggtcagctgtcagcggcgctattgcctacgaggcacagtggcgccgtaacgacgggaactggattaatgtgccgcgcaactcgaccacctcgtttgaggtcagcggcatttatgccggtcgttatctggttcgcgtccgcgcgataaatgcggcggagatctcgagcggctgggcgtattccgaagagaaaaccctgaccggcaaggtcggcgagccgctggcaccgctggcgctggcaacccgttctctggttcatggggtccaggttagctgggagttcccgaccggctccggggatacgctgcgcacggaactacagtacagtaaaaatcaggacggcagtgcgccgatgccgttatcagacgtggcctatccggggaaaagctatcagcagatgggcctcagtatgggtgcagaattctggtatcgggtgcgccttgtggatcgtcttggcaatgaaagcccgtggaccggctgggtccaggggatggccagcgataactttgatgactactacgaaaacctgaccgacgcgatcaaggatacggctgcctgggaggaaacgcagcgcaccattagcgaaacacaggaaggtatccgcaatacgcagcaggaactggagcagaccgctgaagctctgcgtaaggaagccgaagaccaggcgaagcaggtcagccaggatattgatgcatcggcgaaaagcatcacggctgatgttgacgggaagatctccgccgtgaataaaaccatcacggatgagattacctcggtcaatgaggctctcgattctggtctggctcaggcaaacaaaggcgttcaggaggcaaaatccgccgtcgcagatgcgaacaagcagatcgcaactgtgaacaagtcgctgaccgacagcatcacccaggtaagacagtcagtcaccgatacggctgcggaaatcaacgccaccatcgacctggagattgccagggtcagcaaaacgctggccgacggcgatgccgcattgaatgcgcagataaagactgccgaaaatggcctgaagcagtcgctgtctcaggtcaacaccacgctgaccaatgcggtgaagcaggagaccgcggatcgtatcgccgatgttaacgcgaaggcgtcacaggccgctgatgaactgctggcggcaacgcaggggattgaggcgagtatcgagagcctgactcaggtgatgaagaccgccgatgaaaatctggcgcgggaaatgtccagcctcgctgccggcgctaatatccagttcgattcgcaggttatctggcatttcaacaatcagacgaccgagggctggaccggcagcgccggcgtaccgggtgtgtcacaggatggctggttacgcccggcggacagcgccaccgatccgtacattacctctccaggcgggctggctgtcgatggtgcggcgtaccgtttcatcatgctgcgctttcgtaaaaccggcaaaccagtctgggcgggtgagatccgctgggtgtctgccggcgaaaacttcaataacacgaagcgatacattgttgctgagccggaatatgccgatggggtggcaaccctgacggtgcgtgatattccgtggacagggaacattgatcgtattcgcctggacctgacgaaccagcaggatgccagcaactttatcgaattcgactggatcgccgttggccggccagcacccggcgccagtacggcggctttgcaggatgtgcgcagtacgctgagtaacgcgctgactgccgaagcgcaggcacgcagcacgttggcggcgcagatgcgtggctcctatgatgggagcgatctggagaaagtcacctccgggctgctgtaccaggaaaaaaccgcacgcgttaccgccatctcggcggaagttaaggccagagagtccctgcagacgcagtttaacgacaacaaagctgctgtttctggtgaactgagttctctgacgacagagcagagcgcgcaggcgagccgtatcggtggcctggaaaccagcctcgggaaaaaagccgatgcagccgcgctgacgtccctgacgcagaaagttgagcaacagggcgccacgctgacatcgcagggcgccgcgttaacatcgctcactaaccgggttggccagacggaaacgggcctggctggtactaatgaggcgctgagcgggctgcagtctgttgttacccagcatggcgacaggataaccagccagggtcagtccatcacgaaactgacgagcgatttgggcatgacaaatgccgcgctggcgaagaaagccgaagcggctgcggtcactgccttaacgcagcaggtagagcaaaacggacgggatattcgcagcaatactgacagcatcaccagcctgtcgaatcaactggtcaatggccagccgaatcgctggtcccgtcgactctatccggtgcagctggctaacgccgggacagtcccgtcattcagcgatgttcgcgctgtggcaccaacggtagtggatgaggtggccgacgcggccaaactggactttacgtccgccggcagctatctgatcgcgctgtattcctgccaggtgaaagtggccgcagataccaccatcacactggcgcccggcgccagggtttttgatgataccggcgccatatttgtgaatggggttcaggtcgcctggggtaacgccagctggaataccgtcagttttgaactgaaagccggctggaacaccgttgagtttctggtgaatcagtggaccggccaggcgtatatcaacctgggcctgaagctgtcagacaaggttgccgagatgtactccggtctcggggtttccgcgctggcaaacgcagccggcgtgctcagctcgaatgtcagccagattggcaacgaggtggtcagcaattcgcagagcatcacccaactccggaatgcgctgacgcagacagacgcgaacgtggccagcaaagcggatcagacggcgatgaactcgctaaccggacgagtggagaagacggaatccgggctgacggctgctaacgccaacattacctcgctgaaatccgctgtacgggccggaaacgcatcaggcggagatttaattcccaacccgacatttgacccggcttacgaccagatggggtttagcgtcgtatccacgacggctgaggaggtccctcctggctgcccgtatggttatgcggccagaattgccagccgggatcaccatcctaactttgccgcgttcccggccacgcttaacgatgtgattgagatcagcgcactggttgcctgcggcgccggcacggcgaattttaatctgtatgttggcaccgccgttcggccagatacgagcaccggtgcgccactcatggcggggggcggaaaatcaccttccgcgacctggcagagaaccacctggcgcttcaaggtcacgcaggcgatggtagacaggggttatatccgcccgttcctgcagatctcgcagaacagcccgtatggcaccgtatggttcgttacggactggcatatgcgaaatgtgacagcggcgcaaaaggttcaggatactgcggatgccacggcggcggcggttgactcgctgaccaccaccgtgacgcaacagggtaatctgctgacctcgaccggcaaccggacaacccagctggaaaacgggctggccaccaccaatgccgcagtggccaaaaaggctgatgcgacagcggtgcaggatttgaccaataccgtcacacagctgggcaacgatctgactgctgcgaacagcgccatcacgaaactgaccggaaatctggcgaataccgataaagcgctggcgcagaaagccgatgcgactgcgctggccacgctcgacacgaaagtgacgcagcagggtaaaacgctggagagccagagcaattcgctgacgaatctgtcgaacagtctctcgcaagttgcggcagatatcgatgccagcggtcagataccgggtaacctggtcgtgaatccctcatttgaacgcgggctggatggttataccgggcggtcaaccgcgaccagtgtggtggaggtttccgctcctcacagcgggacgcgggcgctgaaggttgatccggggagcgtgtctccggggcaatacatcccgtttgttcaggggcgaacctatgaaatcggggtgtgggtcaaggaacccggagcgacgacggataatggcgcggggaacaacaagttgcggatcggtaactctgccggccagccggtctttgagcgtccgtacaacagcggcacggtggggacaaactggaccctggtttccggtcgctggaaagcgacggagacagccagcctgccggtgacgctgagcaactatctgattaatggcagccgctacttcgatgatttttacgtcactgacgttaccgaccgggtggacatcgatgccaccgccggcgccgttaccggactgacgagccgggtcagcacagcggaaggggctatcacctcgcaaagccagcagctgacgaacctgcagaacagcctgaacacgaccaacagcaatgtgtcgaagaaggccgatgcaacggcactgacttcggtcgataaccgggtgacagaggcggaagggaaactgaccacacagagccagcagctgacaaatctggcgaatgtgctgacggccacccgcaacgctggcgacaacctgatcccgaactttgattttctacagggcagcactgcctgggatattcagtatccagccggtgtgacttttggcgatttcggggacgggaaagcgggggtccggctgaaccggacgactaacaccagtccggggatcttctccaacaacaacaagccggtgccgctgaatggccagcgcaagtaccgcgtggtggtgaaggccaaaggtgtttccggcgcgatgagtctgctgatccgtcgccagaacaaaatcggccagacggacagtacgtatgaggataaaacggtcacgctgaccactgactggcaaaccatcacctgggaaaccggattgacggctgccggcgcggacgggcagaacttcaaactttattctcatccgacaaacggtgaaatctggctcgattccgtccgggtttttgatatcaccgatgaaaccaacatcaaggcgaccagcgatgctgtttcgtctctgaccgggacggtgacgaaccaggggaacaccctgacatcacaggggcaatccatcacggcgctgaataacgcgctggaaggggtcaaaggcgatgtggcgaagaaggctgatgcgtcggcggtcagttcactgaccaaccgggttacccagactgaaaaggatatccgtagccaggccgacagcctgaccaggctgaatacatcgctgaagcaacaggcaacacggggagccaatgtactgccggacggcagttttgaatcctatgccgtcggcgatgttctcagtaatgcccgcgctgttatcaccagtgaagctgcgcacagcgggaccaaaagcctgcgtgttacgcgcagtacggagtacaacccgaacgcgacggataataacgatacccatatcttttctggtatgcaggttcgcgataatgcggtctattacgtggaggcgtgggttaagttgccggctggctcgaccgccgatccgaccgtttatatggtgctaggattttccttccaggattctgccaatggctggtcgtggcctggcctgaacgtgaaagtctccgagttgtcggtggacaactggacaaaggtcagtggctatctgaccaacaaccgaaccgcactgaaacaggcaatggtgaggatctccatcccgaatacaccaaaagttcgcctgggtgacgccttcctgattgatgatctgatcatcactgacgtgaccgatgcgaaagcggcgctcgatgccgccgatgcgaatgcgcaggcgctttccagtctgtccgcgtcagtcacgcagaacgggaagaatattacgtctcagggcagcgcgatcacgaagctgcagtcggatgtgacgcaacttggtaaggatatcagcggcaaggccgatgccagcgcgctgacgaatctgacgacccgcgtgacggctaccgaaggcagcctgaaatcgcagggagacagcctgaccaacctgcagaacagcctgaacacgactaacagcaatgtggcgaagaaggctgatgcaacggcgctgcagagcctgcagaacaccgttgaacagcatggcagggatctgaccacgcaaagcagcgcgctgacgaacctggaaaacaacttttcctccctggccgttggcgggaccaaccttatccgcaatgcggacacactggagggatggagcagccgccacgccacagagacgtatctgggcgaccgcgtggcctacacccggctggcgaaaggtgcatccggttatatccagctggatgaacagacgctggatgttaccgggcgtactgaatttgtattcagcttctatgcgaaaggtgcctataacggacaggaaatggcgagttatttttataacccgtcgaacactaccaccacggaaaccagccagggggttaaaggcggggccggtgacggcaaggcggtcacgaaactgaccaccgcatgggcgcgttactgggtgaaatgggttattcctgccaccagtggcaccaaacggctgattgccgcgcgtctggaaagcgcgacgtctgccgacaaagaagtctggctctgtcgccctcagctggaaaccgggaccgtgatgactgactggtcaccgagtccggatgatgcggccagcggtattaccgcgaacacatcggccattaacagcctcaccagtcgggtgacgaatgccgaggggcaactgaccgcgcagtctcagagcatcacgaatctgcagaacagcctgaacaccaccaacaacaacgtggcacaaaaggccagcgcgcagtcggtgagtgatctcaccagccgggtcaccagtgcggaaggcaaaatcacctcccaggggcaggctatcacgaagctgcagggcgatttgagcagcaccaccgataaggtcaacaccaaagcggatcagacggcgcttaacgcgctgactggccgggtggagaaaaccgaggcaggcctcacggcagccaacagcaacatcgtcagcctgacggcggcggtgaacgccgggaatgctgccggggatgattacatcccaaacccgtcatttgatccggcgtatgaccgcatgggttatgacgtggtggagaccactgctgcaggtgtgccggctgactgcccgttcaggtatgccgtccggctggccgggcgagaccatgtgccaaaaatcaacaacatcgctgtgacgccgggcgacgtttacgaaatgtctgctctggtagcgtgtggtaccggcagcgctgactttaatttctacatcggtcgggccaccactgctactggtggtattggggcgagagcgtccgggggaaacaccaagaccaccaccgcgtggaaacgagccacctggcgctttactgtgccggcagacacgaacttcctgcgaccgttcctgcaggttaatcagagcagcccgttcggcactgtctggtacgctgccgactggcatatgcgtaacgtgacggcggcgaacagtgcgcagaaaaccgcagatgcgaccgcaaaagcggtggattcactgaccaccacggttagccagcagggcgatacgctcagcagcatcggcacgcggaccacctcgctggagaacagcctccggtcgacaaacgatacggtgagtaaaaaggctgacacgacagcggtgacgcagctgcagggcacggtgacgcagcaggggaatgacatcgcggcagccaacagcgcgctgacaaaactcagcagcgatctggccacgacgaatgcgaatgtgaacaaaaaagcggacgcaagcgcgatgaacaccctgcagaaccaggtcactgagcagggcaaaacactcagtgcgcaaggggattctctaacgcaacttagtaacagcctgagccagacggcagcggatattgacgccagcgggaaaatgccgggcaacctcattgtcaacggcagttttgagcgcggcgcggcgggctttaccggctggagcagtaccgcgacggtggccgatttacaggttccgcattcgggtaacaaggcgctgaaaatgtccgccggccagtcgaacctggtcgggcaggaaatcagtatcacgcagggtcgtacctaccgcatgggggtatgggcgaagcaggacccgggaaccacgattaaagatgcgggtaacacgaagtttcgtgtggccgacagcactggcctgctggtcggctcaaactacggaccgtttagttctggctggcaactggtaacgtttgactggaaagccacgaagaccacgacggccagtttccagctgacgaccttcctcagcgcgggggcaatgtatttcgatgatttccatgtcctcgatgttacggatgaaaaggatatcgcagctaatgccggggccatttctcagatgaatacccgcgtcaccgctgctgaaggggctatcaccacccaggcgcagcagctgacgaaactcagcggcgatctggccgtcacgaatgcggcggtcagtaagaaggccgagcaaagcgctgtcaccgggttgaccacccggatgacgtctgccgagggtaaactggattcgcagtcgcagcagctcaccagtctgcagaacagcctgaccacgatgaatactgagctgggtaaaaaggctgacacgtccgcggtgagttcactgaccggtcgcgtaagccaggtggaaaacaccatcaccagccagtcgcagagcatcacgtcgctgaccagcaccatcaataccatccgcactcagggagctaatccgtgggttgacggtacgtttgaaagctacagcgatggccaggtgctgggcgggaacggcacagccgttgtggtggcgtctcagaaattcaccggcaataagagcctgcaggtgagtcgaggagcgaacaataacggcaacagcgataaacagcttgggagctggcagtcagtccgtgaggatgcgaagttccggtttgagttctgggctatgatgccggcggatcaggcgccatcctccgggtggacaacgctggtcggcattaactcactgaatgctgccggtcaaaactcctggcagtcggcggtcactgtcagcgaagccgctcttggtgcgcgtgataagtgggtgaaatttacgggtattgccagtaacaacgggggtgggagaacacgcgcagtggtctggatctctacccgtggcgcctccggcagcggcacccccggttattcgctgtatatcgacgatctggttatcacggatgttaccgatgcgaaagctgcacaggatgcctctgacgcgacggcgagtgccgtgagcggtctgacggctcgcgtaacggatgctgaagggaaaatcaccgcccaggcgcagcagcagacggcactggccacgaaagtggataatgccaactcccgcgtcgataacatggcgaagacgctaagcgacagccagagcacacaggccagcctgaatacctcgcttcagtcgcagattgacgcgcaggcggccgccaacatcaaaaaccagacgacgctggacaacacgattaaatcggtggccagtatcaccagtacccagcagacgcatgcaacggcactggaggcgctggcaacgcagcagacgaccctgacatccagtgtcggggatctcagcgcttccgttcagaacaccgccaaaaccgtggcggatgtgaatggtacggtgagttcgctgtggtcgatgaaggttgagacggttaacgggaagaatgttggcgcggggattacgctgggcagcaatggtgaaacgagcgacatgatcctctacgctgaccgcttctcgctgtttaaccgtaataatgcgacggctgttccggtgatggttgccgaaggcaatgagctgtatatcgatacggcacgtatcaaaaacagttccctgacctcaaccaaaatcgcggacggttccatcacgaacgcgaagatcggcaacgagatccgctcgaatgactttgttgacgggtcacgcggctggcgtatcgccaaggatggctcttcgcagttcaacaacgtgatcgttcgcggtgcggtttatgcgactgacggctggttccagggtacggtatatgcgaaccacatcgagggcgacatcgggtcatttgcgatcaacatcgctcagcaccgcacgcgcaaggtgccgaaggctacatggcagtggtttgagctggcccggttccggcggcagaatttcgaccaggtgatcaatattcgcggtggactcctccagacggatagcatcactatcgacggcggcgcgaaactcagagcggggatgtcctacgcgccaggggctgacggcggactgaatcctggctatctgtcgtatgcaatgcttcttcgtggcacaggcgctacgtctggtggcggcagtatggagctaggcattgagcttatgtatgaaacaggtggagcaacacgcctgttaacggcgcaagagtcaatgaacgtagacaacatgtcatttgtcgtccctgccggtactggcgacgctgttctgcgatatggctgttacctggaccgtaacggacagatggtattaaccatcctctcaagattcgacgccttcgccgcgcgcaataacaacgtaattcgcggttcatcaacctgataacaatatatggccccgcaaggggccttttctttttccagggaaaaccatccaggaggaactttattatggcgatgtatgaagtcggtaccgtcacgggtgccgcgtcgcaggcacgggtgacaggtgcgacaacaaaatggtcacaggaggcgctggggatactgcccgggtcgattctagtggtctaccgcagcggtagtgctgacctgtatgcgatcaaatccgtggacagcgacacgcaactgacgctgacccggaatatcaccaccgcattttccggtgccagttacggcattattaccgctgaaaccgccagcacctcgtcgtttgctaaccagctggccagcgcgtttgcattctggcgtagtgtagtggagggctggtcgatggccctgaccggcagcggcaatatcaccctgactgacccgatcacaggaaagcaggtgaccgtgccggcgatagccgggatggcgaaggcctcggatcttaacgcgctggcaaaactcaccggaggaaacaaactcgacggctcgcaggttataaccagcgataatgccggttttatactcggtaagaactcagatctggctctgctcaaaaaacaggggcaaggcgggacaattgccgttggctcgggaacaccgtttagggttcagcgttcaagagcgaccactgtatcaccggcagacacctttgatgacatcctcgttattgatgccaacaaccgaacgacactacctggcgcgctgattgccggcggcgacatcgacaacacgacgaaggggttgctgtatacccaggcgattgagctgtcgatgaacacgccatacattgactttcaccataacaaaagtgctaacgactacaccgcacgcctcatcactacagccgcagatcaacttagtgttcagggaagccatctacgggtagacagagacctgcgggtggggcaagcggccgacatcggcagctggatgcagtgtcgctatgactgtgtgtcccagcagaccgacttcggttcccctgccattggcgcgttgatttccggtggcaaagtccggtcccgcatgtcagggcgtggaggaaacggcgacacggctggagcgtggggtggtttctaccttgaagaatacgttgggtacaaccaccgagtggtactgtatatggacggtttcggccaaaaagatgcttggctcttttacaccggagggacaatctccacccctaaaggcgatgttatgaccactggctcagacgtgcggctgaaaaaggattttacggaatcccaggaaggggcctccaggcgtattaacgcgctgggggtatgtgagttcaacatgaaaggcgaaacacgccgtaggcgtggatttattgctcaacaagctgaaaaagttgacccgatttacacctttcaaagcggcgatgtagaaattgatggcgagaagatcaatatccttaacgtagaccatacggccatcatcgcggatcttgttcttacggtgcaggagttaacaaaacaagtgcgtgatttgaacaagcaggttcaaacaaaagagtactgattgagagaaaataggttatcaaaactcggataatttatcatgtaatcagcatgttagaattaacataaaaatggttctagataagtgttcagaaacatattttttttaaaaatcaaagtattaagagcaatgcagagaactactgctgcgccacatgcagtggttcgaagccgcagacctgatcgtcaaaggcatggaaggcgctatcgccgccaagaccgtgacctatgacttcgaacgtctgatggaaggcgctaaactgctgaaatgtagcgagtttggcgacgcgattatcgcgaatatgtaatcccgttagtggattaagtaaaagcgggagccgatgggctctcgttttttttcgccttcaggcaattattctgccggacgcttgaagcattaggcgatggcgaatgtcccgcagcgcaacgttcaacaaagctatatacctcatgacagggagagatccatttgccgtaagagctcgcatgaaaacggattgcacgccaggcgtcatactgatggcccgaccggcttaaaccggggccgttcggcgaaaatgtgctgtagcctaaactcaggctatccgcgcactttcagattaaacagccgggacagcgccgctctgccgctatccgtcacttgtacttcccgatatcccggcgcgcgcgttatccatcctttttgcaggaacagcgtcattagcgccgagccggcgtcgccgcccagatgaaaacgtctttcgctccagtcgagacaggggcagcaaggcttacgccgtgggcgggcgttaaacactgcgccaaggcgttcaagctgggttttaccggctgacgtcagggccaggccatctgccgccagccatttttccctcagcataaattcataaatattgaccgccagctcgcccgccagatgatcgtagcaggtccgggcgtagcgaagattaaccggcgtgctggggagaagcgtcttatgcgcttgcatagagacgcccatcaggttttccagcagcccggcaatatgcgagcccgccaggcggtaatagcggtggcgcccctgcgagagacacaccaccagtccgttgctgagcagccgggcaagatggccgctggtggtggaggcggacacctcggcgaccgtactgagttcggttgccgtccatgcgcgcccgtccatcagcgcgcagagaatactgacccttgacgagtcagagagggctgaggccaccatcgccatagcggtttccagcgcctcctctggctcactgtcttgctgcggtttcaggagattcattcagaaagtatggcccattttttggtcacttccgctgcccgggcgtcatcatcggtaaggagaatgagccggttacggtggtcgctgtactgtaccagaatattaataccattatgggccagggtgtctgcgatgtctcccagttccccaggacgttcctgaggtaactttcgtatcagaggacggcatacattgctgaccgtaaagccggcctcggtcagcaccctgcgggctgtctcaccgtcttccaccagaaaatgcgcatgtccggcatcaggcgtggtgaatacgccgccgccttcgagccccacgccgttgttacccagcgccatacccattgcgccaagcgagcccggcgagttgctgagaatcacgtgaatgtcatacatctgactgtgctccccgatccgatgcgtaatcccggaacacgcgggctacgcgtattctgtaatatgaaaaaatcgatgctttgccttcgcgctgggcagccagatgccgctcattttgctgccagttggccaccgaggcttcatcttcccaccaggatagcgagaggattttgccgggcgtactcaggctctgaaagcgctcaatggcaataaaccccggcgtgtctgaaagcaaaggcgtcagcccggccgccagctgaagatatctttcctgtgcttgtggtaaggcgtcggcctcaaaaagtaccgcaatcataagtctgctccatggtgaatttcccggcagtctactgacggccagagcaggaagcttcggtgtgcagcgaaatatgcctggcaggagatcaacgattgcaacggaaatgcttccagcgttattgcgatggtgaataaaaaagaacgccagccatgcgatacggcagcctgagcgcacagggctggctgagttttagtgaaatcgcgatgtggggggataaaccctgagggctgcggctatcgatgaaagcgatcgccgacgggcagtacgggcgggaaagtcgttttactgacatgcagaatatgaacccggaaacgctcgcccggactagcgaagcgccgccgggcgataatcgaaagagcacgttgtctgccaccggtcacgccttcaggctccgtgctctcctcgggccttagccgggagacctgcgtctcgcctactgtgcatggcggcgcagggtggaggcggggtggcgccgcagcgcctcttcgggacgcacagggcgccgcaccagttcgccgccgcagttcgggcaatgtccgttcagtcgcgtcgtcatgcagtcccggcaaaaggtgcactcgaacgaacagataaacgcctcgggtgagtctggcggcagatctttatcacagcattcgcaattcggacgtaactcgagcatcaacttctcctctggtgaacggctatatcagcgacggcgggccaaagcacgctatgtttatatcatgccgcgatcggtccgccgagaatttccttgcgcggtaatcgccttctcagagggtcgctttcccgggctgcattcccggtacgaggatcactttgcggcacgcctcttcacgtttctcaaagatctgatagccgcgcgcggcctcctccagcggcatatggtgagtgacaatctcctccggggtaagcagcccttgctcaataagcgccagcagatccggcaaccaggcgtggacgtgggtttgtcccatcctgaaggtcagtcctttatcaaaggcatcgccaaacataaagccgtggatgaaaccggcgtaaaccccgggtacgctgacgatgccgccgcggcgcacggcggcgatgcactggcgcagggcttttccgctgctcccctcgattttcagggtgctgaggacggtttccgtaaggctacctttcgcctcgaagcccacggcgtcgatcaccgcgtcgacgccgcgatggcccggcgtgttatcgataatccactgcgcaggatcgtcatggtggtcaaagtttatcgggatcgcgccatagcgttgttgcgcgaaatcgagtcggtaatcgttatgatcgatgataaatatctgttctgcgccattgagcctggcgcaggaggcgcagagcaggcctaccgggccggcgccaaaaatagccacgctactgccgggtttgacctcggcgtttttaaccgcctgccaggcggtgggcagaatatctgacagaaacagcaccttttcatcgggtaaggtgtctggcactttaaacggtccggtattggctttggggacccgtacatattccgcctggccgcccgggatcccgccgtacaaatcgctatagccaaacagcgccgccggtggcgaaatgccttttcgattgagcgtcgcgccctggccgctattggtgctttcgcaggcggcatactgctgcaagcgacaaaagaagcagtctccgcaggcgatgacaaacgggataaccacccggtcgcctttgcggaccgcggtgacctcggaaccggcttccaccacttcccccataaattcatggccgaaaatatcaccatggtgcgtgccggggatctttccgcggtacagatgcagatcggaaccgcaaatcgctgtcgcggtgacgcgcagaataatatcgtccgctgcctcaagagccgggtcaggcatggtgtcgacgctgacatgatgcgggccgtgataagtgagtgctttcatagaatattctcctcgagagaaaggttgacagcatgcggttcttcggcctggtgaacggctgctatcgtcaccgataaatcatcgtaaaaaataaagcgtagagtactaataatggaactgcgtgatattccaggagctgaatatattccacgcttcgcttatttcccggctggtctgttcgagttatttgcctattgcccttatgtgtgccagtattaatcgggcatgatattcgctccattttgtttgctagccgcttccccagcggctttttttatccgtaaaaccaggaaaaattctgaatttccgtctggcaaagggcaatgctgccgcttcgttatataacccaacggtagtaatcctccggtatagataattatttgccgcagaggtgatctgcatacattatttccctgaacacagtgagttagcggcaaggtgccgtctggttatttttgaggtgtcttgtagaattattccgaattactgctaaaaggtgtcgaaaaaacggaataataatttgactaaccagcattatccgctagatttaaatatcgaacgacgagtgatacggaatattttcgtatcgtactgacataaccgatatacatgaggtgaaatatggcagagcatcgtggtggttccggtaattttgctgaagaccgtgaaaaagcttctgaagcaggtcgtaaaggtggtcagcacagcggcgggaactttaaaaatgatccgcagcgtgcgtccgaagcgggtaaaaaaggcggacagaatagccacggcggtggccgcaagtccgataattcctgattatccttttccttgcaccctgaagtgaaagtatctcctgcgagtctgtcacagactcgcagttattttctgactccagaaggtatttctatgaatatgaaaagcattgaagatgtatttattcacctgctctcagatacctacagcgcagagaaacaattaacccgcgggctggctaaactagccagagcggcgtccagtgaaaaactcagcgcggcgttcaatgctcatcttgaagaaacccagggccagatcgaacgtatcgaccagattattgaacaggaatccaacctgaaaatcaaacgcatgaaatgcgtggccatggaaggattaatcgaagaagctaatgaagtcgttgagagcacggaaaaaaatgaggtacgtgatgctgcattaattgccgctgcgcaaaaggtcgagcattacgaaattgccagttacggtactctggtcaccctggcagagcagttgggctataaaaaagcagccaaactgcttgccgaaaccctggaagaagaaaaacaaaccgatgtgaaattaaccgatctggcggtaggtaatattaatatgaaagcggaaaaataaactctccctgacacgaggaaatcacgatgaatcacgttgaacattaccatgactggctacgagatgcgcatgccatggaaaaacaggcagagtccatgctggaatcaatggctggccgtatcgataattatccggatctccgtgccagaatcgaacagcatgttaacgagaccaaacggcaaattaccgtgctggaagagatcctcgaccgcaatgagatttcgcgctcggtgattaaagattcgatgagtaaaatggcggctctcggccagtccatcggcgggatgtttccttccgatgaaatcgtcaaaggctcgatcagcgggtacgttttcgagcagtttgaaatcgcctgctatacctctctgctggcggccgctgaaaaagcgggcgataccgcctccatcccagccattgaagccatcctggcggaagagcgggaaatggccgactggctgattaaacatattcctcagaccacggagcagtttctcctgcgttcagatgctgacggcgtagaagcgaaaaaataacccaggaggcaggcctatgtttcgtcatgtgaaacaactgcagtataccgtacgcgttgctgaaccgaatccggggctcgcgaatttactgctcgaacagtttggcggccctcagggcgagctggccgccgcgtgtcgttatttcacccagggattaagcgatgacgatcccggccgcaaagatatgctgatggatatcgcgacagaggagttgagccatctggagatcattggcactttggtcggcatgctgaataaaggcgccaaaggagccctggcggagggcaccgagagcgaggcggaactctatcgttcgctcaccgccaacggcaatgacagccatattacatccctgctgtacggcggcggtaccccgctgaccaactcggcgggcgtgccgtggacggcggcctacattgatactatcggcgaacccaccgccgacctgcggtcgaatgtcgcggcggaggcgagggcgaagatcgtctatgaacgcctgatcaacgtgaccgacgatcctggcgtgaaagacgcgctggccttcctgatgacccgcgaagcggcgcatcagctctcttttgagaaggccctgcagtcgattcgcaacaactatccaccgggcaaactgccgcccattagcgagtacgctaacacctactacaatatgtctgaaggtggagaagtacgcggcagctggaacagtgacaaacacttcgattatgtcaaggatccacagccggccgtagatggcggagatggcagtgcttctgtcggcctgacgccagagcaggaagcgctgtgcaaagcgatgctgaagcgaacgcagtctgacccgcagggcgatcctttgaccggcgccgaactcggcgccgggaagcaaaacacttcatcatcagctaagtgatgttcgcatgagccccggctgcggccggggcgattcacaatgatgggtgtggaatatgtttgaattcgacgcgtttcatctggcccgattgcaattcgcctttaccgtatccttccatatcctctttccggccatcaccatcggccttgccagctaccttgtggtgcttgaggggatgtggctgcgaacccgggataatgtctggcgttcactctacaatttctggctgaaaatctttgccgtcaattttggcatgggcgtagtctccggattagtcatgtcctatcagttcggcaccaactggagcggattttcccagttcgctggcagtattaccggcccgctgctgctgtacgaagtgctgaccgccttcttccttgaagcgggattcctcggggtgatgctgtttggctggaataaagtgccgccagcgctgcattttattaccacctgcatggtggcgcttggcacgttggtttctaccttctggatccttgcctccaatagctggatgcagacgccgcagggttttatcatcgaaaatggccatctcatcccgcaggactggctggcgattatctttaacccctcttttccgtatcgcttgttccatatggcgatagccgcgtttctcagcagcgccatgttcgtcggggcctctgccgcgtggcatcttctgcgcggcaacgactcgccggccatccgcaaaatgctgtcgatggcgatgtggatggcgctgctggtggcgccgatccaggcggtggtgggggatatgcatggtcttaacacccttgagcatcagccggcgaagatcgcggccatcgaagggcactgggaaaatcgccccggcgaggccacgccgctgctgctgtttggcctgccggacatggagcaggagcggacccgctatggtctggagatccccgctctcggtagcctgatccttacccacagcctgcataagcaggtgccggccctgaaagacttcccgaaagaggaccgaccctattcgcccgccgtcttctggtcgtttcgcatcatggtcgggatgggcgtgttgatgatcgccttagggatctgcagcgcctggctgcgctatcggcggcggctgtaccactcgcgtcccttccagtggtttgcgctctgtatggggcccgccggtcttattgccctggtcgccgggtgggtgaccaccgagatgggccgccagccgtgggtgatatacgggttgttgcgcacgcgggatgcggtgtcgttgcacagcaccctgcagatggccatcagcctgctggtatttatcgtggtttactgcgccgtgtttggcgtggggtattactacattttccggcttatcaaaaaagggccgcagccggtgacggagctgacctcgcaaaccgcaggcaccccggcgcgtccgctctcagcggctgagccggtgcgtgatgaggagaacgcatcatgagcatcgatatctcggtgatttggtttgtcatcattgtcttcgccacgctgatgtatatcgtgatggatggtttcgatttaggtattgggatgctgttcagcgtggtgcatgatggcgaagagcgcgatgtgatggtcaacagcgtcgcccccgtctgggatggtaacgaaacctggctggtgctcggcggggcagggctgttcggcgcctttccgctggcctatgcggtgatcaccgatgcgctggttatcccgctgacggcgatgctcatcggcctgatttttcgcggcgtggcctttgaatttcgttttaaagcggttccctcgcatcgcatcttctgggactatgcctttgccggcggctcgctgttggcgaccttcagccaggggattgtcgtcggcgcgtttatcaacggctttgcggtggctgaccgccgcttcgccggttcgacgctggactggcttacccctttcaatctgttctgcggtctggggctggtggtggcctatctgctgctgggcaccacgtggttgattatgaaaagcgaaggcgcgctgcagcagcggatgcgcgagctgacccgcaaggtactgctggcgctgatggcggtgatcgcggtggtcagcgtctggacgccgttgggctggcgctacgtggcggaacgctggtttacgctgcccaatttcttctggttcgtgccggtgccgattctggtgttggctctgagcctgtggatctggcgcctgagcgcgcgccccgccagccatgcccgcccatttatcctgacgctgggcctgattttcctcggcttcagcgggctggggatcagcgtctggccgaacattatcccaccgcatatctctctgtgggatgccgctgcgccgccgtccagccaggtatttatgctgccgggcgcgctgctcattatcccggtgatcctgatgtataccgcctggagctactacgtctttcgcggcaaagtctccggcagcgagggctatcactgagcctgattcgcgccggcaggtgaggatttgccggcgcgtcgcgccgtccggtcagggatgaccgagagggatgcgcacaaaccggtgatctgctgcaacgactcgggccgggtgtttatgccttcggtggcttgatcttaataataaatcgttcgttaacccgggtgatcctcgcgccaatatcgccaaactcggtggcgattttaaaaaaatcgtccgcggcgacatcaaaatcgagctcaatcttcgggtgttgtcctgtcgccagtaattcatagaaatggtcaaggctgcgggctttttcgctaggcatcttatttctccatggtaaaccaatctgcaggggttttattgcttacggcgcttttacggattattcagcaggatgacaaacgtgcctgatataaaattatgcaatgacagtaagaatgaggtagggcgaggttattccgtgttgttaaaccgcgtggcgacgcgttgtccgccataccatgacggcagagacgaccctgcggcgccggttgatgatagacattttttgatgacaaattaatgacaataaaatgaatctgtccgggctcgggatggcatcgtgctaaataattttattctgtggctgttaaggtggttgttaactactttatggtgatggagcgtcttttttagggccaacggcgagggaacaacgatgcaattacttgatttattcgcaggcttattatggttaagcagcgttatcttcctgctgtttgttcttgatgtgatcatcacccgttatctttatcgtaaataatcgacaacgacagcggcgttgggcataggggacggcgtcggaggatgataatataacccgcggactgattcagaaaggaatgcgcggtggccgggagaattgattacgatattgaaaaataccagtttaccgaagccggtgagacgccacggctccgggagcagtggcgcgaagtatacctggagtgtcgtcagctgcgggccggggcagaggagcgcctgcgcattgcgttactgaacgtcgactatgtcaccagcttcgagctgccttttcgcctgctgctggtgcgcgcgccgcagctaatcgccgatgttcgcgagacgttgcagcttagccgtaaagccgccgttttcaacggcaaacgttacggctgcgtctatagtttgaaacaggatttacaggctgtcccggaagcctttcattaccgcctggcaaaccgcattcgtcgcgtcgatgcaacggggctgacggcggccccgtaccagcagattgcccgggagataaagccggcccgggagcggctccgccaggcgctgaacgccggcctgccggtcaccgctctcgacgccctgttctggttcggcagtcagcgagtggcggcggacatcgcgcagttgcgccggtccggtatggcgattgtcacgacggaggtggaggtcagcgacaatttgttcaataccacccgacgagtgcccgtttaccgcctggccagcgagtgagtcggcaacctttcgcccagccgttgcctctgcagacagttgaccattgccccgtcgaaccagacgcacagccctctggcgacaggccgcggggccggttccagccatgcgctggcgatgagcatgaggagcattagcgccagtggaaccatgtattttcttttcactgccctttatccgctgcgcctgttctgccagcaaggtagcggtaaagtatgacgtttcgttgaccggggcagcgtttttattatcggcaagcggttgcgttgggccagagattattcatcttttggcatacgagaggacgaaaactggcggcttgtatttttgatttttattacaccacgcttttttttgccgccggggaaaagcgtaatgtggctacgactggatgcggctcgtcatgtaactggctggtttgaaacaatattttaattgttgtctaaacgcatgcgacagcggtggctaatttatattaattcactttaccgatcaataaattatatgttgatagtttttagctatcgaatgtttcttatcgatcattttaaactatttttgttggcgggaaatatatgacatgctttaaccctttcttatttttggtattttttaaatggttgaagaaaacgcgaaaaatacctcctatcgcttcgtactggagcccgctattagcgatgatggcagctgccactcgtgggaattgctcactaaagatattatagcacccgcacgaaataacgcctcagcgcccgcgttttctttctccacgcttaccgaaagcgataagcttgcactatttacccgacaaatcgagttgctttccgtatttgatttttccctggtcgataataagccgatctcgctcaatatcgatgatttattaagccattttattctgacggaccgctatctctgcgattttctgcgctcgtgtaagcatattgctttggagataaatgagaattttcatgagtttatcgccggccgcgagctgacggcgctaagcacgctggcggcgctttgtccggtctggctggatgattttggtcgcgggcgaacctccttcccgctgctggagagattccgcttcgattgcgtcaaagtggataaggattacttctgggataaagaaaacgaccccgctttgcccggtctgttgcagtctattcataccctgaccggccatgtgatcgttgagggtatcgaaaccgaaaagcaaaaacggttaatcacttctgccggggacatcataggtcagggccgctactggaaggaagaatatatttttctttgcggttgagggtcgaccgggggctggtttcggttacctgctattcttttattatccagttttaaataccccctttgctacagatagtctttattagcgcagtgataagcgcctctcttttttatgaaggatcattccctgtaaatacccccatgcgtaacgccccgatcgccatttcgacgtaagccaggagctgacctctgagctgcgcgagctggtgaaaaaagatctcgccgctgcgatcaattaatcctgcctgcgccatccgctcaggatcgcgcggcatggaaaaatgccgccgtttaccggcggctattgcttattttgcgctaccctggtttttttccagccgggcgaaatactccggtgcaaacgggcgcggatcgacgtcggcaaacggcgcgcgctcaaagtgcgatttcagcgcccaggggaccgtgcagtcaaaaatggtcttgcagctgatgccatttccacggatcgacgggctgtattccggcgtctgggacggatccagctggtgaccgcgaatgccggggattgtcgtaatgctgacgtccccctgcatgcgggtggtcatcgcccacaggatatcgtcgctgtcaaagatgtcgacatcttcatcaaccagaataatattttttagctcggaataggtcgccagcgccagcagcgcggcctgcccctgccggccttcatcggcgggttgacgttttttcacctgcaggatcccgaggaacttaccgccacccgcggtgtgggcgtagacattttgtaaaaagcccggaatggcggcctcgacggcattccagatactggcttccgttggcaggccggcgagggtggtatgctcttcccccggtcccaccagggtctgcagaatcgcattgtttcgcatggtcactgctttgactttgattaccggcagcgacggattagcgccgccgcagtagccaggaaattccggcatcgcgtggccgctattggtgtgctgatcctctctgacgcgcacgccaggcaacagctcaccttcgataacgatctcggcgcgggcgatggctttctccgggacgctgacgccctgaaccagctccaccggacgttgacgcagcgcgccggcgacgcccagctcgttatagccgaacggcgtggtaggggcttcgaagcaggcgccaatatagatggccggatcgagacccatattgatggttatcggcagtggtttgccggcggcctcggccttctggcgaaacacttcgatatggcggccggcggcaagaaacatcgacagctcatcccggccctgaacgcacaagcggtggatggtgacgtcggtcagcgaggcgtcgtcgggatcgctggccagcgccaggcccaggcagaagaaggggccggcgtcgataggggtgttggtgggcgccggaagcagggtgcgcaaatcaaaatccggatcgtcggccagaaagatctgttcctggcagggggcgctgctggccgggacgaccaccggcgcgaccggttttttcaccgccttacccacttcaagggccagctgcgaggcttcgcagcccagcagcagcgcggcccgctggcggctggcgtgcatacccaccagaatgcgcgagtgtggataacccttaatattgttaaacatcatcgccggcccgatgcgagtggggcgcttcacggtgccgcccgcgccgatatggcgataaacaccggccagctcggcgttagggtcaaccggatgatcggtttcgagatactgattgtcatgctgttgcagcagcgcgatggcgtcgcgcagatcctgaatcggtgcggtcatgatgttctccttagcgtatcgatgcgcacagtatgcttcgcaggctaatggttatcaattgcatcatttatgctttattgataagctttttcttatcaatttgtagggaggagtccgaccatgtccttgcgagcgttacgccattttgtggtcgttgccgaagagttgcatatgcaccgggcggcggagcggttacatatcgcccagcccgccctcagtcagcagattaagcagcttgagcagcgcctgggcgtggtgctcttttcccgcgctaaccgccgtctgactctgaccgccgcgggcgaggcctttttacacaagacgcggctggcgctggaaatggccgatcaggcggtgctggacgcccagcgcaccgcgcggggcgagcaggggaggctgcatttggggtatgtctccagcgcgatgtacgacagtaaactgccggggctcctgcgccggctgcgcgccgactggccggggattgagctgtcgctggtgcagggggatgtgcaaatgctctacgaagcgctgttggatctgcgtctggatatcgccatcatccgcgcgccgctggcctcgccgccggacgcgctggtggtcaggccgtttgtacgtgaaaagctctgcctggcgctctatcaacagcatccgctggccggcgtgggcgcgcttaatctggcctcattgcgcactgacaactggatctcgcttgacgatccgcagggcaccggactggagcaggtttttatggatgcctgtcgcgtcgcgggctttacgccgcaggtggcgcagcggattaacgacgttacctcgatgattagcctggtctccgccggggtgggagtggcgttggttccgctctcggcgcgggccttacgccttgataacgtggtgtatatcgatctccaggatcggctggcggagagtgagctgagcatggtttaccaccgccatattcgttcggcggtggtaaggaaagttatctcgctgcttaataccgctgagcgatagtcccggttagctggtcttcaggcggccaaagctgacaatccttgagcggcccagctctttcgcccggtacagcgcggcatccgccgcgcgcagcagactatcgctttgggtgtgctgcgggtagctggcgatgccaatcgacacatccacctggcctatctcggtcagaccatcgcgcagcgtcatattgcgcacctgggtgtagatctcgctggcgcactggtgcgccccggcttcgtcaatcccggggagcagcactaaaaactcctcgcccccgtagcggaaagccatgccgatatcgcgcaccgcgcgctgcacaatggtcgcaacgctcttaatcaccagatccccagcctcatggccatagcgatcattgatggttttaaaatgatcgatgtcgatcatcagacagctcagcggagtatgggtatggaccgccagcgccatctgcgaatgcagcgcttcgtcaagatgatggcggttacgcaggccggtcagggaatcgaacagcgctttttccagcagggcgctgcgcaaacgctgattggccagcgccaggcccaacgcttccgccatcagctcgagataggcccgggaaggagcgtcactggcggtgacgttctggaaagtcagcaggccaatggcttcgccctgggcgatgagcggtacgcagagcgactggccggcgtgcgtctccggcaaatgatagcaggtgatatcgggctcgccctgcaccggcggatggctgagtccccgccgtatcgcccagcagtcgtcgggagaaaagggcgtcgtctcaccggcgggcgacagccactgcgctacgcagcgcatctgccaggggtcggtatccagaacatacagtttaccggggatcgtcggggcgatattcggcgcaaaccgctccgccaccttaatcacatcctcaatggtttcacagccctgcagccgctgagtcatacgcgccagcagctcgcggatcgcccagtcggcgtcgcgctgctgctccagccgctgacgggccaggccgttctcgcgaaaaatgcggatcgcctgagccatgtcaccaatctcatccacctgggtaaagtgcggcgtctccaccgcataatcctgggaggcgagacgctggaccacgtcgctcaggcgaaccaccgggtagagcacccggcgtttgagaatgaagccgaggacgaacaaaaacatcagggcggtcaggccgaccatgatttccgacagcgtacgccagatccgcgagcgctcggtggcctggtcgatagcgacggcggcgcgatgctcaagcatctggcggaagcgatcgatctgcgtctgcatgcgctccagttcagtctcgtacgcggtgccgtacagcaccgcgatggccgctggcgcatcgccgcgagcgacatgcgccagggccgcctgctgttcatcctgtagctcatcggcgatccgcaggccatcctggagcagcgccagctcctcgcggctggcgccgttatctttcaggccgcccagccgctgctctatgctcttgtcggtctgctgcagctgctgatattgcgtaagcgtctccggtgaaggctttatcacgtacagccgggcgaggtcagacagcgcccaggcgtcgttttccacctcgtcggagagggtatcaaagacctggcgctgctgtaccgcctggcgttcgacgcggtcggcgctggaggccatgagcatagcgctcccggaagccagcgtcaggccaacggtgatcccgtaagcccagttagtgatggtggcgattctcaccgtgaatttccttgcatgcagatgaagctgttttgattatagaactccgcccccgccacgacggcggcccgcttcagaggcggcgctcgctatgcagaggggcaagggtctgaagaatgatggcgtgtagcgtttccgcatggtggcgcaaaacgaggaagacatcgctatccagagcgccatttataacatccgcttccataatctgtaaggcttcctgccaggccatccctttacgataagggcgatcttcggtcagcgcggtgaaaatatcggcgatggagataatccggtcggcgagggtcaggtgctccttttcgagatgcagagggtagccgctgccgtccattttttcatgatgattcgaggcccagttaatgatgtcgccgagctcgctatagtcgctgagaagttcgccggtcatgtagctgtgctcccgcacctgactcagctcctcatcatccagctcgccctctttttcgagaatggagagtgggatatagaccttgccaatatcgtgtagatagccggctatctgtatttgctggcaggtgggctccggcagctgcatccagcgggcaagctggcgggcgatttcccccaccatgatgctatgggtggcggtaaagctgctgtaggtgtcgacgattttggcaatcagcaggcagacatccttcagaccgtgaatatccagatagcgcgtgttgatggggccaataatctccagcagccgctgaatatggccggggtgaaggtgctgccagaagttcgcattttcagcgacctcgcacaggatatcgcagagcggcggatcgatctcccgatgcaaagcgacgaactgttccaccaccgcccgcgtgggccaggcggcaacgtggctatcggccggcagcagccgttcaaaggcatcagcgaaatagacaatgtgctgttcgcgggagccccggtggttcgggctaaaatggtgatcgcgaataaagggaacgatgggctggaaggtcgctaatccctccagcatcgccacaccctggcgctgatgcgggtcgtggatattatcgatagcatccagcgaatgaatggtgcgtttatcccccagcacgccgatatcgtgcagcagcgcggcgcaaaaaatggtctgctgccgttcgtcaggcagttccagcctttgcgccagcgtcagggcgattaaggccgttcgttgcatatgccggtgcacttcagggttaatgatctggatgactctggtggtcagcatcagggccgacttcagggcaatacgcatctctgttctccgttcgcgtgacctggcgggcaaaaatgctctcgccggtgacggaagtgtcgataatctgatcgcaatgcgtgttgtgtgttgctgaacaggtaaatcctcagaatgttttggttcatagctctgcccgtttcagatccagtggtgcaccagagttgggcgatatcgtcctaagaaccttattattgtctgatagttaaccatttcccccccagaaaagaaatgaattctggcaagccctttgcattaagcaagcgtaagtttgattaatgtctatgaagggagtgacctgtatgaattttagagcattacttgccattgcgttattgacgatgagcagcctggcgtttagcgagacgcgtcttccgcatattgttattttagccaccggcggaacgattgctggttcggcggccagcaatacccaaacaaccggctataaagccggggcgattggggtgcagacgctgattaacgccgtgccggaaatgagtaaaatcgctcacgtcgagggcgagcaggtggccaatattggcagtgagaatatgaccagcgatattattctccagctctcgaagcgggtaaatgcgctattggcccgggacgatgtcgatggcgtggtgatcacccatggtacggacacgctggatgaaaccccgtatttcctcaatctgacggtgaaaagcaacaagccggtggtctttaccgcggcgatgcgcccggcgacggcgatcagcgccgacgggccgatgaacctgctggaagcggtcacggtcgctgccgatcctgatgcccggggacgcggggtaatggtggtgcttaacgaccgcatcggcgcggcgcgctttgtcaccaaaactaatgccacttcgctggataccttccgggcgcccgaggagggctatcttggtgtcgtggtgggcggaaaaccccagttcgagacgcgggtggataaaattcacacgctgcgctcggtgttcgatgtgcgtcagctgaaggttctgccgaaggtggtgattatttatggttaccaggacgatccggagtatatgtacgatgcggcgatcgcccatcatgccgacggtattatctacgccggaaccggggcggggtcggtgtcggtacgtagcgccgccggtatcaaaaaagcgcagcaggcgggcatcgtggtggtgcgagcctcccgtaccggcagcggcgtcgtaccgccggatgacagccagcccgggctggtggccgactccctcaacccggcaaaagcgcgtatactgctgatgaccgcgctgacgcagactaaagatccgcagctgattcagcaatatttccatacctactgatcctctgcggcgagggcgttgttcacaccctcgccgtgctttcttctcaatgacctggcttccatgcaaatcgatggcgaatgattacccatcattcactccacctgtgtttcccacgaggcgtaaagaaatattttttattgtccggcgggcacagtatttcaatgcaccgcgcttattttaaaagcaggtttaaataagtctattcttaattgttgtcttaaagtcgttttaatctttcttatgctgacggattaaaaaagatgcatttcgcagtgggacgcgtttaatactcgctttgacagactacgatgcatcccaacgcggtcaggccgccgatcgcgcggctcagcggacgcctgccaccggcggccagggccgcactgcggcagctttcggttgttttcgttagtaaagctgatgattagcgtgaaaatgatatgcatgatgaatatattaagcgtggttcaagatttaagtttacatttagtaacatatgtgccgcaattatgtttttttgtcagcttgctgttttttacttgccggagggaatttcagcggattagtattgtcgaacttgctgtacgtaccgcctaatgatgataaatggattctgttttccttaagcgttaccacataattaatgtttacaggaaaaatcatggcctgcgtatttaataaacaacttttacacccgcgtaactggctgacctggttcgggctcggcatcctctggttaatcgtgcaactgccttatccgctgctgcattttatcggcaccagcgctggtcgcctttcccgtcgctttcttaaacgccgcgaacatatcgcccggcgtaatatcgaactctgcttcccggacatgtcgccagcggcgcgcgagacgctgatcgatcaaaactttatgtcgctgggaatggggcttatcgaaaccggcatggcctggttctggagcgacgagcgggtcaaaaaatggtttgatgtcgaggggttcgccaaccttaatcacgcgcttagcggtgggaaaggggtaatggtcgtcggcgtgcactttatgtcgctggagctgggcggccgcgcgatggggctgtgtcggccaatgatggccacctaccggccgcacaacagcccgctgatggagtgggtgcaaacccgcggtcgcctgcgttcgaacaaagcgatgatcgatcgcaacaacctgaccggtctggtgcatgccttaaaatccggtgaagcggtgtggttcgcgcccgatcaggattacggtcccaagggcagcgtctttgcaccttttttctccgtcccgcaggcggcgaccaccaacggcacctatgtcctgtcccgcttatcgggcgcgaaaatgttgagcatcagcatggtacgtaagctggatcgccggggctatagcctgcatatcagcgaggtgatgaatgactatccgggtgaggataagcagatcgccgccggctatatcaacaaggttattgagcgcgagatcctgcgcgctcccgagcagtatctgtgggtacaccgtcgttttaaaacccgcccgctgggcgaaccttccgtctattaaccttcccgcacaggctgcgctttcaaaatcccgacagttggggtaacgtgagccggatcatgttttagtcgtgcgcgaaggagtgcagagtgttcgctgagtttggtgttctgaattatttaacctatctggtcggggcggtgtttatcatcctcgttcctggccctaatacgtttttcgtgctgaaaacgggcattgcccacggggtgaagaaaggctatctggcggcggcgggcgtctttattggcgacgcagtgctgatgtttctggcattcgccggggtggcgacgctgattaaaaccacgccggtgttgtttaacgtcgtgcgctacctcggggcaatttacctgctgtggctcgggggcaaaatgctctatgcggtgctgacccagcgcgacggccagtccgacgccagcgcggagccggcgagcgcgatcctcaagcgctctctgaccctgagcctgaccaatccgaaagcgattctgttctatgtgtcgtttttcgtgcagtttatcgatgtcaacgccaaaacccccggcgtggcgttctttatcctggcgctgaccctcgaggtgattagcttctgctatatgagctttttgatcctctccggctcgtttgtcacccgctacgtcaaaacccgcaagaagctggctaaacttggcaacagcctgattggtctggttttcgtcgggttcgccgcgcgcctggctaccctgcagtcctgatccccacgggccggttacccgctgaccggcccgccgtctcttattctgccctgtaacaaaaacccttcattttttattgcattggtgttacatatacagccgtttatcgctcagcaaaaaggaagccccgatgattctgcaaaaactcctcagcaataaaaactgcaaaaaatactgtctgtcgctcgcggtggtgtttgctatcgcgctggcggtagtggggcgggcgaccttcgggggcgtggtgagcgagtacaatatgccgtactcagagtggacgacgtccatgttcttcctgcagggggcgatggtgacggtttacagcattgtctttaccgcgctcttcgctatccccctcggctttattttcctcggcgccgatcgtcaggattaagcgtcaacgggcgaaccgcggttcgcccggtcttatcggcttatcaacagcgtgaagcattagtcgtcgtcatgatagtgatgatggtggtggtggcgatgggggtgatatccatcgtcaataatgcatcccgataacagcgtgcacagcgcaataatcaacggtaacacgatcggttttttcatccttacttctcccgctattcttattccccggggccgagaatgccgcggcggataacgtgagtgtaaagggttaacttattgatgggataggataaatccgcaatatcgccgcggcgatcaccaccagcctaactgggtgccggccaccgccacgatggcgacaaccagcatgataatggtgctttttttcattatgccccacccggcgccgcatagccgccgacaaaaaaccagccgagaaagacgacggcgatgataaagatcgccaccgggaaaagaatacccaatttcatgattgtgtccctgtgcccacgaatgatgccctgcatgatactggatatcgcggtactttagtcaatatgaatgaaattctcctggcggcgggacttcttatcctggtacatcgcctcatcggcagtgcgtaaggccgcttcaacatcgatactctgcggatcgcaggtgaccaccccgaagctagcgccctcatagtcgatacgctgttcgccgaggaagtagacgccgcacagagcctgacgcagagacgtgacatacgcctgctgtgcggcaggctgctgggcgctaccgacgatcaaaaactcatcgccgccaaggcggccaacgatatcttcccggcgcgcgacagcggtgagtcgtttgccgacctgcaccagaaagctgtcgccgcacggatggccgaaccgatcgttaatggctttgaaaccatcgagatcgataaaaataagcgagacctgctgctgctgggcgcgggcggaggcaaagcgtaacgccagctgcttaaacagcgcgcggcgattgggaagctgggtgagctcatcggtagacgagtgcagctccagcgcgacgtttgccgcctgcagctgttgcaccagggtgtctttttccacgtagtgggaaatgagcttcgcaaacaggcccatgacctgttcgccttcgaggttataaggctgttgttgccggctggtggcgcagagggtgccgaacagagagccgtcggccaggcggacgggaatgcttaaaaaagtagcgattcccagctcctgggcggcgatgcaggagtgccagcggttggcaacgtcattgctaaacgtacactgatcctcaagggcgcgtttgcacagggattcatcccaggggacggaaaatccttccgggatctgcatttcgctgctgttgtgggcgaacatgatctgctgccgctgggcgttggtatcaatgcgggtgaggtaggtggactccattcgcgtcaccgcctccagcatctccagcagctggcgcaccagggtttccagggattgttccgcagcgagggtttgcgacacccgggcaagaataaaatctgacatgaataatacagctccagcacgccaaacgtcaccccagcatattgggctgcaaacggacatcagcgtcaaataaacagtgatatttttaaatttatcacatctgtctggggaatacttgtccacgcggtgggaaaaaaagccccgtcgggggcgacggggaaaaactcattgattatggaatgatctgttctctggtcagttcgagaacagggctactctacgggggaaaagtgcaggcaagatggagaaaacgtggagattcaggctaaaatccccgggcattcaggaaagggaggaacaatgaaaaagctactggctattttgcccctggcgctggccggctgtacccagccgcagcccactgcgccgacgaaaaccatcggcatgcccaaccccgcggcggtatactgtcagcaatccggcggcacccgggtgccggtgcaaacgccgcagggcgtcagcactcagtgcaaactacccagcggcgaaaccctcgacgagtgggcgctgtggcgccgggatcatccggctaaatcgtaaccggcagggccgccagccaggcggccaacacccgggcatgattctgctcggtgttcttcgcagcgtacagcagcgtcagcggctggcgttgcgccagcgccgccagccgcaggcccgtttcgcgatgggcgtcgagctcctgacgatagcgctggctgaagtgggcgaaatcgatcgcctcgccgtgaaaggctttgcgcagctcagcggaaggcgttaactccttacaccactcatcacaggccagcgcctcttttttaatcccccgcggccagagacggtcgaccagcacccgatagccgtcgctgctttcctgcgggtcatacacccgtttacactgaatcatcatcctgctccttctgtgccatccaggcgagcaactgcgggatttgcccgtcggaaaataccgtgatgccgtgggcgcggagtaggtcggcggccacgccggcgcccgctttgcgccgtccgcgaaaggaaccgtcatagacaaactggctgccgcaggtagggctgccgtcggtgagtaacgctgcctgacagcccgcttcccgggcggcgctgagcgccagccaggcggccagctgataatgttcggtgacgtcgcggccgtcgctttccacgatccgcgcccgtccggcaagcacatcgccgccggtaccgccgaggatctccgccggcagtcggggcgtaggcagaccggccgccagctccgggcagtggatcaccagccgccccgcctgctgccagcgggacagcgtcgccgccagctgtgccttctcgctaccgttataccgcacctggaatcccatcaggcaggcgctgaccaaaagcttatttttcattctctctcccttacgcgctttttccagtatacctcacccgtcggccacggcggtggggtgaaaataaggattgtgttccacaggcgggatcgctattctgacgtgccttgtgctgtccgtctcgtccagacataaggaacctgctatgaaaactcctttacgcctcgcccttgtcggcgattatcaccccgatattgttgcccatcaggccattcccctggcgatagacgatgccgccgccgtgctggagcagccggtgaaatatgactggctcgccaccccgtcgatcgcctccggcgaggcgctggcggagtacgatgccatctgggtcgttcccggcagcccgtatcgtcacccggaaggcgcgtttaccgcgatccgctatgcccgggaaaacagcattcctttcctcggcacctgcggcggctttcagcacgcggtgattgaatacgcccgcaacgtgctcggctggcaggacgccggacatgcggaaaccgacagcgaagggcggatggtgattgctcccctcagctgctcgctggtggagacctctgccgtcgtcgagctgcgggcgaatacgctgattgcccgcgcctatggccgggagagcattgaagagggctaccactgccggtacggcgtgagcagcgcgtttgcggcggagctggagcagggcgatctgcgcgtcaccggctgggatgaagagggtgagatccgcgccgtcgagctggtgacgcacccgttttttgtcgccaccttgttccagcatgagcgtcacgcgctggacgggcgtcccgcgccgctggtgcaggcgtttctccgcgccgcggcacaataattccaccggcagcgggcgctgccggtcatcttcaggggtgaatttcccggtcacgtccggcgagcgcgccgcagaccgccatcaccagcgaaatcagcgccaccgccagcagcggaatatgccagtcgccattggcatcatggatcctgcccatcagcggcggcccgcaggcggccagcagatagccgacgctctgcgccatccctgacagcgccgcggcctgatgcgccgagctggcgcgcaggccgataaacgtcaggccgaggatcatagtggctccggagccaaagccgaacagcagcgtccagccgatcgccagctcaggcaacagccacagcccggcggcgctgatggcgcacatcagggcgaccagcaccgcgatcccgcgctggtcgcgcagccgatgcaggatcagcggtatcgccaggccgggcgcggcggtcgccagctgcagcaggccatgcagcgagccggcctgcgcttcgctatagcccatactctgcagaatcgacggcagccagccgataatcacgtaatagaccagcgagttgatgccgaggaacagcgtcacctgccaggccagcgccgaccgccagatcccccggttatgcatagcgcctgagccggtcaatggcgtctccgcccggcaccgggactgcggcagccagctgaggagcgccagtagcgggaagaccatcagcagcagcagcgccccgcgccagccgaatccggccatcgccacggggaccaccagcgccgaaccaagcgccgccgcgccgcccatcgtcagggaataggcgccggtcatccgcgcgacatgctgcgagaaatcccgtttaatcagcccgggcagcagcacgttacccagcgcaatgccgcagccgatcaccgccgtgccgataaacagcagcgcagcggagggcagggagcgcagggcaatgccggcgcagatcagcagcatcgccagcagcaggctgcgttccatgccgaaccggcgggcaacccctgccgccagcggcgagacaaggccaaaggccagcagcggcagggtagtgagcagcccggtctgcgcggtggtcaggccatagtcgctacgaatcgcgtccagcagcggcgccgcgccggtaaagaccacgcgcagggtggtggcgatgagcaggataccggcaatcagcagcgcggggcggcggccggtagaggagatcacagaagacatatcattctcaaggtaactaacgaggggggttacgatagcggctttgtccctcgtttaaatcaagctaaaatgacagattatcgctaatatcggacaatatgatgattggactggggctggatggctatgaaccggacagtggccacgaatcggccattgcctttcgtatccgggtggtggaggcggagcagtatattccggcgcattcccaccgtaaggggcagctgatccttgccctgcacggcgccttgacctgcgaggtggagaacgcaatgtggatggtgccgccgcagtatgcggtgtgggttccggggcagctgtcccacagtaaccgcgctacccccggcgcccaggtatgcttcctgttcatcgagccgggcgccgcgccgatgccggatcgctgctgtacgctaaagatttccccgctggtgcgagagctgatccttactctggcggagcgcggcggagagtccctggccgcccccgccacggcccggctggtgcaggttctgtttgatgagctgccccgccagccgcaggagcacctgcagctgccggtatcaaaccacccgaaaattcgtcaaatggtgacgatgatggctgaggatccggcgcgctggcagaccctgagccagtgggcggcggtgtttgcgatgagcgagcggaatctggcccgcctggtcgtgcgcgaaacggggctgagctttcgccgctggcgccatcagctgcagctgatcctcgcgctgcagctgctgatccgcgggcagacggtgcagcagacggctcaggcgctgggctacgattccaccaccgccttcatcaccatgtttaaaaaagggctcgggcagacaccgggccgctatcacggtagcctggctacgacttcccaataaacaatgagatgatcccggcggcaatcagcggcccgaccgggacgccgcgaaacagggcgacgccgagtactgtaccgaccagcagcccggccaccagatgcggctgggagcccatcagggagacgccgcgcccgccgagccacgaaacaaacaccccgaccgcaatcgccagcagcgatttccagttcataaaggagtggatcagcgtcgagggcggcagcgtgccgctggcgataggcgccatcacgccgatggtcagaataatgatcccgacggtcagtccctgtttctcaacccagggaaagaaggcgttcagcggcgtgacgcgcacgataatcagcacgaggatggagatcgccacggtggtgttatgactgataaagccgagcgccgccagacccagcaggatcaacagggtggtatcaaacatgtacagaggtccttgccaaaataagaatgccaaaaatatcccgcttactctacgcatcgtggcgtgaataaacaggatttttacgccatgcggcggaaatctgggcggatgcccggttagctaagacggcgaaaggtcgcgatctctggtcgggcgatatgtaaatagtcttcggtgtcgagaatgatcgaccggtccaggcgcccggcgttaaaggcgatttgtggaaagcgttcaaacagcagcgggtccgccaccagccgcagcgccggatggaaactgaaggggggaatggcgccgaacacgcaggcggtgagggcctccacctccgccgggctggccagcgaggctttgctgccgccgatatgccgggccaggctggcgaggtcggcctgccgatcggcggcgaggatcgccagcacatgctggttgacgccgtttcctttcactttacagactaacgctttcgcgccctggccaagcgcggtgccgcggattgccgagacggcttcgcactgaccgaccgcctcgtgcgccatcacccggtagcgggcccggtgctcgtcgagcagcgcgcacagccgttggtggatattaccttctactgcttcaagcatagcgtcctcctgacatcataaagcagccagcttagcgctgttgcgccggcctgccaacggtgggccgggaaattcaccattcgctcattattacttcacagtgctgtggtgcaatcccgcaggcgcagatgagttttgtaaataaaaaaaagaatgattttcattttcaatcgaactttttttatttcgctcagtctctatcggacgacacagaatattaataattgccgtaatgaggttaggatgatgcacgatgcaaccatgcagggttccccacgcaagaaatttaataaaataagggagctcaacagacggcggaattactttactaagaaagtacgtaatgccctgcgggtgggggtggcgaaagcgctctgggatcgccgacgccgtcagccggtagatttgtcgtctgcgaaaaccgtcctgttgatgcgcaatgagggggcggtcggcgatgtagtggtggattccgcgctggtgaaatgcctgcatcagtcaggctatatcgttgattttttgctgacgacctctaacagccaggtgatgcgttataacccgcggatccgccatatttatgaagctgacccggtcacgtccgccgattttttgcgtaaatttaatcataacgttcctcgcgacgttattaatgaactggctaataataagtacgatattattattgacccttcgctgttcgatattcccgtgcatcgcctgcggcttttccgacaaataaaagccaaatcagtgctcgggtttaataaatggccatcgattaagcactactcccactcttttgattttgactgccagcgctggcacgtgacgaaaacgttcgagctgatcgccgattatctccaactggacacccgcgggctggacgcttacgacctggcggtgcccgggccgattatgcaggaggtggcgcagtatctggcgtcgctaagcggaaaagcggtggtgattaatatttttgccggccatgccgaccgcagtctctcgcagacgcagctggcggaactgctcgacaaactgctggcccgccatccggggagcgcggctattctgctcgatcaccggcgcgagatccgcatcccgctgccgccggaggtggtgattaacccatttaacacgttacaccatgcgatggcgctgatcgcccaggcggagctgattatctccccggacacctcggtggtgcacatggcggcggcgtggaacaaaccgctgatcgcggtctataaggacgttctgcttaataaccggctgtgggccccgggctatgacaacgccaggcagatcattgttaaatgcgggaaggtccatcagcatcgcgggctagtggatagaattatagcggcgctaccggagacgctgtgaggcgatgaggggagacaggtagggctcacctgctggccgtatgcaagagccagcaggtgagcgaaggttgcattgccagtctgcaaccgccgctattgtactgttgcccgcggctctgccacatccgggaaagctcttaaagaggtggtcgccgcgactgacgggcgggatcactcttcagtgagccacatatccgcctcttcaaacatctcctgcaccgtgcggctgatcagctctttttcatgcttgctggcgtcggtgttgatcgccggcagcgtcatcatcggcttcacccgcacttccgcctccgggaaaatgcgctgcatgcgtttggtcagctcgttaagaatggcctctctggcgcccggcagcccggcaaaattgcgcttgtcataaatcagttccacaaacatcttctgtcctctgtatgctgatcgcgggcgatagttttactgtattaatgtacagtgtcaagcgaatgccgcggcgctgcgcatctaccacctcgcgcggcgggcggactgcgcgcaaaagcagcaaacggttcgctggcgctgaagaagacccctattgacatcaaggagttatttcagtgctggcgattgatagctggagccgatattgaccggtaaaattggcaaaactactgtatatatattcagtgtgcgccgggagaccggttagagatcaaggggtgaaagtccccgaccattgaaggaccagcaatccacaaggtccccgagtcatgcgttgcataccgcgaggtatggggcgaagcgttgacaggggtgttgacaggccagccattgagccacgaaatgtatattaaattaccgggtgccgacgttgtactgttaacggaaggcaacatcatagggtgcgatactgcgagtgccacatggacccggcggggtctgagaccctggcatgtcaatacgatctctacgcgggaaccgggagatctcccctctgaccatctgccagtgtcggagatggcccgcaccgggaagacgaggagtcatagccggtgatgtacggagaggagaagtcggactcgctcatagtagcggcgaagcaggcgaacaacccgaaaggagcggagtcagtggagcgaaggagcggggccaaggggaacgcggaacagccacacatgcgccggacacagagccgggaaagcatgtcacagaggctgtcacgcgtgcgggaagctgcgaagcagcggaagaaagaacggtttacagcattgttccacctgctgacagtcgaagcactggaagccgcattcctctccctgagcaggaaagcggccgccggagtggatggcatcaggtggatggactacgccggaaacatgaagaacaacataacagatctgcaccggaggctacatcagggcagctacagggcgcagcccggcaggcgtcactacatcccaaaagcggatggaaaacaacgcccgctcggcatcgcctcgctggaggacaagatcgtccagtatgcgctggtgaaaatcctgaacgcagtctatgaaaacgactttatggggttctcatacgggttcagacccgggcgaagccagcacgatgcactggacgcactggccacagggctggtacgcactaacgtaaactgggtactggatgccgacatcagtcagttcttcgacagggtgagccacgaatggctgatcaggttcacagagcatcggatcggcgaccggagggtaatcaggctcatacgtaagtggctcacagccgggacgtcggaggagggtcaatggcgagcaacggaggaaggcaccccacagggtgcggtcatctcaccgctgctggcaaacatatacctccactacgtcttcgatctgtgggcgcatcagtggcgacgtcgctatgccacaggcaatgtggtaatggtcagatacgccgatgacatcgtcatcgggttcgacaaacgatacgatgcccggcgcttccgtatagccatgcagcgcagactgagggagttcggactcacggttcacccggagaaaacccgtctgatggagttcggccgcttcgctgccgaaaaccgtgccatcaggggaaaaggcaaaccagaaacgttcaacttcctcgggttcacgcacatcagcgggaaagatcgcaacggcaggttcatgctgatacgaaagacccgccgggatcggatgacggcaactctgaaagccatcaaagacggtctgcgaaggcgctggcattactcaatccccgaacagggaaaatggctcaggagagtggttcagggatacctgaactatcactcggtaccgggcaacttccccaccatgcagaagttcaggacacacgtaacaaacctctggcgccgggcgctcaggcgcaggagccagaaggatgatacgacctggacgaaagcaaacaaactggcagccgcatggctaccaagggttcgggttcttcatccatggcctgtggagcggttcaccgccagacacccgaggcaggagcccggtgcgtaaatcgcgcacgccgggatctgtgcggggggtatccggtaacgggtatccctaccgcgacattgtgtggtgggttgaaaaatgaacgtttacacgccggttgagctacgtcagattgtctcctttcccttttttgccgacctggtgcagtgcggctttcccagcccggctcaggactatgttgagaagcgaatcgacctcaacgagctgctggtgcagcatcccagcgcgacctattttgtcaaagccgctggcgacagcatgatcgatgccggcattgacgaaggcgatttgctggtggtggacagcgcgcgtaaagcggagcatggcgatatcgtgattgccgccgtcggcggcgagtttacggtaaagaagctgcagcttctgccgcgggtgcagcttaacccgatgaacccggcctattcgcccatcgtggtcggccgcgaggagacgctcgatattttcggcgtcgtaacctacatcatcaaggcggcgggctgatcatgttcgcgcattgtgatgtgaacgccttctatgccagctgtcagaccgccttccggccagacctgaaggggcggccggtggtggtgctgtcgaataacgacggctgcgtgatcgcccgctcggcggaggcgaagccgtttgtgaaaatgggcgaaccctactttaagcagaaggctgcgtttcttcgccacggcgtcgtggcgtttagcagtaattatgagctgtatgccgacatgtccagccgggtgatggccaccctggaagagctcaccccgcgctgcgaaatttacagtatcgatgaggccttttgcgatgtcagcggtgtgcgtcattgcagagatctgaccgattttggccgcgaaatccgcgccacggtactgcagcgtacccatctgacgctgggcgttggcatcgcccagaccaaaaccctggcgaagctggccaaccacgcggcgaagcagtggccgcggcagacgggcggggtagtggacttgtcctgcccgcagcggcagcgaaagctgatggcgctgctgccggtgagcgaggtctggggcatcgggcggcggatcggcaaaaagcttgaagcgatggggatcggcacggtactccagctggcggagagcgatatccgctttatccgcaagcacttcacggtggtgctcgaacgaacggtacgggagctgcgcggcgagccttgcctggcgctggaggagtttgcccccgctaagcaggaaattatctgcagccgctcgttcggggatcggattacggcctatgaggatatgcgccaggcgatctgcagctatgccgcgcgggcagcagaaaagctgcgcggtgagcatcagtactgccggttcgtctccgcctttgtcaaaaccagccccttcgcgctgaatgaaccctattacggcaacagcgcctcgctaaagctgctgacgccgacccaggactcccgggatattatcgccgcggcgacgagctgtctggatgccatctggaaagcggggcatcgctatcagaaggccggcgtgatgctcggcgatttctacagccagggcgtcgcccagctgaatctgttcgacgagcttgctccgcggcacaacagcgccagactgatgcaggttctcgatcagctgaatgcgaaaaacggcaggggggcgctctattttgccggccaggggatccagcagcagtggcagatgaagcgagagatgctctcgccgcgctacaccacgcgatacggcgacctgctccgcgtcagataacgcgcgctatccctgcaccgcggccggaaaaaccgccgccagccagtcaataaagacgcggagccggggcgggacgtgccggtgccgggcatagacaacgtgaaaaggatagggggccgggcgccaggcgctgaggatctccaccagttcgccgctcgccagcgccggtttcagcgaataggtaaaggtctgcacaatgcctaagcccgcctcgccggcggcaatatgcgcgttgctctcattgatgccgagatggggctctgtcttcagctcggtgctgacgccgtgacgcgtaaagcgaaacggaaacgctctgccgctggccggcgacagatagctgatgagccggtggccatgatgtagttcatccggcgaggcgggggtgccgtagcgctgaagatagcccggggtggcgcaggtgaccagcgtcgcctcgccgattttacgggcgatcagcgtcgagtcttccatcggaccgccgcggatggcgcagtcaatattgccgctgatgaggtccgcgggcttatcggccacctgcaaatcgatacggatatccggccaggaggtcataaagtccgccagcagcgggatcagcacatcgcacgcggtcgacccgccgatggcgatccgtagatggcccttcggcttattgcgggcggtattgaaagacgcgtcgatctcttccaggtcttccagcagacagcgggctttttcatagtactcccgtccttccggcgtcacggtaatacgccgcgtggtgcgctgcaggagggaaaccccaagatgcgcttccagttgctgaatggttttgctgagggtggcgttgggcatattcagcgagtccgcggcgcgggtaaagctgccggcttcgacaacgcgagtgaaggctttgagagctgaaaaccggtccattattcgctttatcctggttactggaggtcattatccaccgaggggaagagtgtttttcagattaggccatttttccgcctcgccgggacgattacagtgctttccatacccggcggggcgcgttcgcgagcctggcctgtttatactctaaccaaggaaatgcaccatgagcaaaaaacttgcggataaagtggcgttagtcaccggcggcagcgccgggattggcctggcgtcggcgaaagcactggcggagcagggcgcgaaggtgtacatcaccggccgccgtcaggaggagctggatgcggcggtaagattcatcgggcccgccgcccgcgggatccgcgccgacgccgccgtattaagcgaccttgacgcggtatttgcgaccattgccgaagagtccggccggctggatgtgctgttcgccaatgccggcggcggagacatgctgccgctgagcgccatcaccgaagcgcacgtcgaccggattttcgccaccaacgtgcgcggggtggtgttcaccgtgcaaaaagcgctgccgctgctcgccgatggcgcctcggtgattttgaccggctctacggcggcggtaaaagggacggctaacttcagcatctatagcgccagtaaggccgcggtacgcagcctggcgcgctcctgggcgctggaggttagcgaccgcgggatccgcatcaatgtggtcagcccggggccggtacgtaccccgggtctgggagggctggtggcggaggcggaccgccagggcttgttcgatgctctggcggccggcgtaccgctcgggcggctgggcgagccggaggagattggccggacggtggtatttttagcgtcggatgagtcgagctttattaacgccgcggagatctatgtcgacggcgggctggcgcaaatctaagcgcctgccgtcgccgcaccgatctgaccgggcagaggcgctttcagcagggcgatcagcagcgtactgcccaccatgatccccgccgccagccacaccattcccgacaggccagctgaggcgatcaactggccgccgacaaacgccccggtgccgatggcggcattaaaaatggccacataaatggctgacgccggctgggcgaccgcgcccgcgctgcgcagcagccaggtctgtaagcctacgaacacaatcgcgatgccggcgccccacagggctaacagtagcccgctaaaacagaacggcagtggcgcaagacgggcggcgccaaggagcgtcagcgcgcccccgctcagcagcagcgcagcgaaaatcagccccttcagatgacgatcgataagcttacccgcgataacgttacccagcagcccggaaacccctgacagcagcagcaggccggagagggcggtcgccgggactccctgcagatttatcagcagcgattcaatgtaggtgaaggcggcaaagtgagcggtaatgatgcaggccgtggcgccatacaggccaccgagcagcggattgcggaagatatcgcgataaacacgcagcctgacgggggctggggcggccagcgggggcagcgtcgagcacagcaccgcagcggcggctagtgacagcaaggccatcgacataaacgcgagtcgccagcccgccagggtggcgataaagctcgccagcggcacccccactacgcttgccgctgacacgccgccaaaaatgatcgccgtggccagccccagccggtgcggcggcaccagctgcgcggcgacaatgccaattaaggcccagaaggcgccatgcgccagggcgccaatcatgcgggcgctcatcagggcgaacatcgaataagaccgggttgcggcgaggcaggaaaacgcgaggatcagcatcagcccgaccagcagcgccttgcgggaaatacgcgccggcattgcgccggaaagcagagccgccagggcgcctacccagccataggcggtgacggcgaggcccacgccggattccgtctggtgaaaatccgccgccagggcgctgagcatgcccaccggcgccagttcgctggtgacgatcgaaaaggcgcagatcccgagcgcaacgacggcaatccagacgcgcgccggcgccgggtggaggggtaaagcaatctctttcatatcaggcgtatccttaggaaaggagcgttccgcgcggtgcacggacgttcaggtgaggagagagcaggcgatcggatggcctggttgtctccgcgagtggcgtgcagtatcatccctgcaaaattgataaaaaagagcagaaaacggagagccgttttccataaatggaaaagagatgacagcagaatttcattgggatgatgcgcgcatcttcctcgccatcgcccgggcgggaacgctgagcggcgccgccgacaagatgaacatgggaattgccaccgtgtcccgccggctggatcggctggagcaggcgttgaacgttccgctcttcagccgccatcagagcggctaccgcctgaccgacgatggcgaagccctgctcgcgcgggcggaggcgctggaatacgctggcctggcgttcggcgaagcggcgcaactgcaggggcatgtcgccggggttgtccgtctggccacctcggataacctggccacgcattttattctgccctccctgaaagggctcctggaccattatcccgagctgcgggtggaggtgctgagcggtgtgcagccggtgaacctgcaccgtcgggatgccgatctggcgatccgcatggtcaagcctgaggccgggcatctgacgttaaagcggctggggacggtggggtttggcgtctatggcgccgccgactgtctggtcggcgcggacggcctgtcgctgagcgaggcggactttgtgggttggccggaaactcaccagcacctgccggccgcccaatggatcacgcgcaccctgcgcggccggccgtgtaaagtcgaagccaatacgctcgtggcccaggtttccgcaatatccgcgggcctcggattgggcgtcctgccgcactttatggcgcgggccagcggcctgcagtgcctgcagccggagatcggcgcggatcagaccctctggctggtgatgcattctgacctggccggatccagacgcgtgcgggttctcgccgaccatctcatcgctctctttgcggaccatcaagatcggctggcgatgccctgaaggggcgcggcttgggcgtgtatcgataagactgcccgaggctgacgagccacgattttttccgcgccagctaacagtgatactcgccgcgcaatattcggcccaatgctgccccgcagtcggaaatactgcagagtgagaggatatccccgtccggcaaaataattttgtgttgttgccagcgcggcattgttgcgctcccccagaaatgcctgtcgatgttagggtgagacgtttatcaccacaggagaatgcaaatgattgtcaggacctggcacggctgtgtgccattgcaacatgctgaggggtttgcccgccacctcgagcggaccggcgtggaacacgctcagagcatcgccggcaaccggggggcgctggtgcgtcaggaaaaccagggcgaatgggcgcatttctttcttgccacttactggcaggatctcgcggcggtcaaagccttcgctggcgaagactatcacgtcgcggtcacctatccggacgacgacgcattcgaactcctctccgacccctatgtgtttcagcatgaagtcgaggccgtgtcgccgctgtaggctgatgaccgggcaggtggaagattggccagcagcaggcggttgctggctgcgcgagagcgacgtctaccttgtatggacagccagccgccgctgggtgaacgtggcatgacgggaacactcagcgcgtgagggccgcgacaatggaggcttccattttctccggcgtcgtgaacggcgcaaaacgcgtgaggggtgtgccgtcgcgaccgatgaggaacttggtgaaattccacttgatccgtccgccgagcacgccgggcaacgcttgtttcagataacgaaacagcgggtgtgcggcggggccgttgacgtccactttctcaaacatcgggaagctcacgccgtagttaacgtgacaagtctgctcgatttcatccgcaccgccgggttcctgcttaccaaactggttgcacgggaaaccaagcactaccagcccctgagccgcgtactttttgtagagcgcttccaggccagcgtattgcggtgtgaagccacaatggctggccgtattcaccaccagaaccaccttgccagcatagtcagccatggagaggggctggccgcgcaggcgggtagccgtcaattgataaaaaggggtcatagcaggctcctgagagtagaaacagttcaacgctgacgatcgcgcgaatgtttgaagcagattaggcagttatgatacacagggttagggatttgtacctggagtgttaaaaaaacgccagatgtcatagagaaaatcgcgaacaggaacggctgaaaatgatgaaatatgtcttatcgctggtggtggtggcgatactcgcaggatgtaccagcacgccaaacttgccgcctcgggataccattgtggcgatgaaacccacagagtccggtattgtcgccagctcagcgaaatacagttaccgctttgtccgtgacggtgtgcctcaggaatatcagcgttataagaccttttatgaacgctttcaccaacaggcttccggcgtgcgggttaactttgtcgtggaacaacatgaggtgacggcggaatatctggtggtgatggatcagcgcaaactggatgccgggcagcatagcgagctggtgaatcagtatcatgcggtgcaaattgataacgatcgcctcggggtgttgtttaaagcgacaggattttggactgcatcggacgcgtcagatctggccgccgcctaccagttagcgcaccccgttgtggtatcaatcaatgataagaccaaaacgattagctcgcttggcgccgttgccctggccccgttgtttccgttttacatgatgtatggatgtgccaccgggccttgtgtctgaggaaaacagccagcaagtcactcgactcactggctgagtatttaattaagcttcacttttagatgactgcttatgaaacagttcgcggaataccgggtagatatcctcctggtcgcgaatatgctgcatggcgaaattatcaaaggtcgcctgcaggtgttcatactcgcgccacagggtctgatgcgcccggcgggtaatttcgatatagctgtaataacgcaccaccggcagaattttcttcgccagcagttcgtggcacagcggggagtcatcggcccagttgtcgccatccgacgcctgggcggcgtagatgttccactgcgccgggtcatagcgggcctgcactacttcatccatcagcttcagggcgctggagacaatggtgccgccggtttcctgagaatagaagaattcgtgctcatccacctcttttgcctgggtatggtggcggatatagaccacgtcgacatttttataagtccggctgaggaacagatacagcaggatataaaagcgcttggccatgtctttggtggcctggtccatcgagcctgagacgtccatcagacagaacatcaccgcctggctggaaggctccggccgtttttcgtaatttttgtagcgtaaatcaaaggtgtcgataaacggcacccgctctattttagcccgcagttcggcaatctctttgcgcaggcgctcctcctccagcagttgcaccggttcgctgcggctgatggcttccagatcctcctccagggcgcgcagttcacgacgcttgccggcggtcatcgccgtacggcgggccagcgagttctgcagtgaacgtaccacgctgatgttggctggcaccccattggaggtaaaacccgcgcgatgggttttaaactcattcagctgccggtgctggtttttcttcaggttcggcagggccagatcttcaaataacagatccaggtattcatctttcgagatctggaagacaaactcatcctttccttcaccatcggcgctggcttgcccctgaccgctaccgccgccgccaccaccgccttgcgggcgctcaatgcggtcgttttgcacaaaatggtcgttgcccgggtggacgcggttgcgcaggccgccgcgaccctgatgaaacatcggctcgttgatatcgtccgtcgggatcgagacggattctccgctctcaatatcggtcaccgagcgcttgttgatggcctcggagatcgactgtttaatctgcgccttataacggcgcaaaaagcgctggcggttgacggcgcttttgtttttcccgttcaggcgtcggtctatgaaccaggtcatatgccctcctgtactgcattagccaactttacttatcatcattcagctgcagttgacccggcggcgtgccgccgggttggacgcatcaggacgatttacgaacccgcaggtaccactcgcacagcaggcgaacctgtttgcgggtgtagcctttctccatcatgcggtcgacaaagtcgtcatgttttttctgctcatcggttgaggttttggcattaaacgaaatgaccggcaacagctcttcggtattggagaacattttcttctcaataaccgtgcgcagtttctcatagctggtccagttcggattacgtccgctgttgttggctctggcacgcagcacaaagttgacgatttcgttacggaagtctttcgggttgctaatcccggctggcttctcaattttctccagctcggcattcaacgattcacggtcaaacagctgcccggtgtccggatcgcggtattcctgatcctggatccagaagtcagcgtaggtgacatagcgatcgaaaatgttctgtccatactcggagtaggattccagataagcggtctggatctctttgccgataaactcggcgtatttcgggatcagatagcctttgaggaattccagatagcgctcggcctgctcctgtgggaactgttcgcgctcaatctgctgctccagcacatagaacagatgcaccgggttagcggccacctcgacgtggtcgaagttaaatacccgagacaggatcttaaaggcaaagcgggtggagagcccgttcatcccttcatcaaccccggcgtaatcgcgatactcctgataggacttcgctttcgggtcggtatctttcagactttcgccgtcatagacccgcatcttcgagtagatgctcgagttctccggctctttcaggcgcgacagaatcgaaaagcgcgccagggtttccagggtgcccggggcgcagggcgcatgggtcagctcactgttgttgagcagtttttcatagatgcggatctcttcggagatacgcaggcaataaggcaccttgacgatatagacgcggtcgaggaaggcctcattgttcttgttattacggaaggtcacccattccgattcgttggagtgagcaaggatgatcccgttaaacggcagggcggagatcccttcggtgccgttatagttaccttcctgggtggcggtcagcagcggatgcagcaccttaatcggcgctttaaacatctcgacgaactccataatcccctggttggcgcggcacagcgcaccggagtagccgtaggcgtccgggtcgttctgcgcatagtgttccagcttacggatatccaccttaccgaccagcgctgaaatatcctggttgttttcatcacccggttcggttttggcgatggcaacctgctcgagaatcgatggccagactttaaccacgcggaatttcgtgatatcgccgccaaactcgtgcaggcgcttggccgcccacggcgacataatggtgccgagatagcgggtcgggatgccgtactctttctggaggatctgcgcatcttcctgtggattgaacaggcacagcgggtgatcgttgaccggactgcgttcgccgttggcgctcagcacatagatgggcacgcgctgcatcagcgctttcagccgttcagccagcgacgatttaccaccgcccaccggccccagcagatagaggatctgtttcttctcttccagcccctgggcggcatgcttgaggtaggaaacgatctgctcaatggcgtcttccataccgtaaaactcttcaaatgccggatagcgtgcgataacccggtttgaaaagagacgggatagccgcggctcgagagccgtatcaaccatgacgggttcaccaatggccatcaacagacgttctgccgcattggcataggcactgcgatcttgccggcagatggtaagaaactcctgcagtgtgaactcttcgtccttggcagcttcgtagcgctggcgatagtgatcgaatatattcatggcatgccgtcctttcgttttttagcacaggttgagagccgttcatatgaatagtgggggcccccggaagacataagctgaacatcgctctcctggtatccagcaacccttatgccaggttgcgggtggggtagcgtgaatgtgcccggcaattacaccttctaaatttaagcgtagatgcatttagaaatcttgcatggcgcagaaaatcaatttcaatgacatatcaataactcatcctgaacatgacgctttttgattcgttgggacgtaaagttgtcatcgggctgtcaccggatggtaagagaagggtggcaaagtgaacgatttgtgtcatatcgggtaaagaatttgaggcatgagacctacgacggtacactgcacgggctgattatttgacaacgggaatatggattgtgactaaaatcaaacttctggcactcggcgtgctgatagcgacgtccgccagcgcggcgcatgccgacgggaagttcactcttggggctggcgtaggggtcgttgagcatccgtataagcaatatgatgcggatgtctatccggtgccggtcattagttatgagagcgaaaacttctggttccacggtctgggcgggggttactacctgtggaatgacaccaacgataaactgtcgattacggcctactggtcgccaatgtacttcaagccgggcgacagcgacagcgagcagatgcgtcgactggataaacgtaaatcgaccgtgatggccggtctttcttatgtccacaacacgccctatggcttcctgcgcacgacgattgccggcgatacgctggataacagcaacggtattaactgggatctcgcctggctgtaccgttacaccaacggtaacctgacgctgacgccgggtattggcgtggagtggaacagcgacaatcagaacgaatattactatggtgtctcccggcacgagtcgcgccgcagcggcatgcgcagctatgacccggacagtagctggaacccgtatctggaactgtcggctaactatcgcttcctcggtgactggagcgtttacggcgtggcgcgctacacgcgtctgtcggatgaaattaccgacagtccgatggtggataaatcctggagcggtctgatctccaccgggatcacctacaccttctgattgtgcattcttacagtgcgcttcatgcatcaaaacagggccttgcgccctgttttgctttatggtggtgcatacggttaaggaggagaacatggtgaaaaaaacagtacgcttcggcgagcaggcggcagtgccggccatcgggctgggcacctggtatatgggcgaacatgcggcgcagcgtcagcaggaagtggctgcactgcgtgcgggcatcgaccatggactgacggtgatcgatacggcggaaatgtacgccgacggcggggcggaggaagtggtgggccaggcgatccgcggtctgcgcgaccgggtagtgctggtctccaaagtctatccctggcatgccggcaaagcggcgatgcaccgcgcctgtgaaaacagcctgcgccggctgcagaccgactatctcgatatgtatctcctgcactggcgcggggatatcccgctgcaggagacggttgaggcgatggagaagctggtggctgagggcaagatccgccgctggggcgtctctaatctggacaccgaggatatgcaggcgctgtggcggacggcggatggcgagcactgtgcaaccaaccaggtgctctaccatctcgcatcgcggggcattgaatacgatctcctgccctggtgccagcagcacagtctgccggtgatggcctactgcccgctggcgcaggcggggcgcttacgcgatggactttttcagcatagcgatatcattaatatggctaacgcgcgggggattacggtagcgtaactgctgctcgcctgggtgattcgtcatccgggagtgctggcgatcccgaaagcggccagtattgagcatgtggtgcagaatgccgcagcgctcgacgtcgtcctcagtggggaagaactcgcgcagctggaccgcctctatccgccgccgcagcgaaaaacccggctggatatggtttaacccatcgttcacggcaaagaaaaacaaaagccccgttaccaacggggcttttgctattagcgttttttcacgctgatggtttgcgccaggcgagagggcgtctcttcgctggctttctgcggctgggttacgcagcaggtttcgacgcaaacgaaggttttgtagccatcgtccggcatatcgcccatgctgacggacagcgccgggcccgggttccaggccaccacattgtgctgatgatgatgcaccacgtcgatagtgcggtttagcgcgtcgtcatggatcacgctgcagctgtcggcgttgagatagacgcgatcggtgcggtcagggaaggtctgcacgccgttgctcagaacgccttcttcggcattgttcactttatcgatatagcgctcgccaagaccgctcaccttcaccgccgcgatatcgccgacgttgaaatagctgtgcagggcagaggtggtctcgaattcaccgtgggcttccagctcgatttcacaggtcttgcccagcttaaagcgggcatagagggtgaactcgtgcggccagagcttcatggtttcagcgctgtgctggagcgcaaaggtcaacattacgccgctgtcgtcttcgtcatgaccttccagggtccatggcagattgcgggcaaagccgtgcgacggcagaccttgctgcgcagaaggaccaaaccagggccagcaaatcggcacgccgccgcgcagggcgacgccctgtttaaacggggtgttgttgctcagccacagaacttcttcttcaccggcgggtttccaggagagcaggtgcgccccctgcagcgccacagaggctttcacctgcggatggtcgatgacaatcagctccaggtcatccagctggcgacgggagatcacgggagaaatggtttcattcaccgggagagcaaaaattttatttatcattgtgcaatcctatctctgcagacaaaaaaaagagcgaccgaagtcgctcttacagattactttttcatctcaacttatttggagatgtgggcaatcagatccagaactttgttggagtagccggtttcgttgtcgtaccaggaaaccagtttcacgaagttgtcgttcagtgcgatacccgctttagcatcgaacacggaagtgcaaacttcgccgttgaagtcggtagaaacaacgtcgtcttcggtgtaacccagaacgcctttcatagcgccttcagaagcggctttgatggctttcttgatttcttcgtaggacgctgctttttccagacgaacggtcaggtcaacaacagatacgttcggagttggaacgcggaacgccataccggtcagtttgccgttcagttctggcagtactttacctactgctttagcagcgccggtagaggacgggatgatgttctgagctgcgccgcggccgccgcgccagtctttgtgagacgggccatcaacggttttctgagtagcggtggtagcgtggacggtggtcatcaggccttcaacgataccgaagttgtcgttgataactttagccagcggcgccaggcagttagtggtgcaggaagcgttggaaacgatgtcctggccagcgtaagcgtcgaagttagcgccgcgaacgaacatcggagtgttgtctttggacgggccagtcagaacgacttttttcgcgccagcggtgatgtgtttacgagcggtttcgtcggtcaggaagataccggttgcttcagcaacaacgtcaacaccaacttcgtcccacttcaggttagccgggtcacgttcagcggtaacacggatttttttaccgttaacgaccagatgaccgtctttcacttcaacggtaccgtcgaaacgaccgtgagtggaatcatacttcagcatgtaagccatgtactctgcgtctaacaggtcgttgattgcaacgatctcgatgtcagaacgtttctgagcagcacggaaaacaatgcgaccgatacggccaaaaccgttgatacctactttgatagtcatatattccaccagctatttgttagtgaataaaaggttgcctgtaaaattacaaaaaccttacgcagcgtcaagcggaatcgtgtcaatcattgcgacaaatcaatcctgagcagacctttgcgcgattgatttgcctcactttccctttgagcccaattccatatgggggctgcgcgcggaattttaaagggcatttaagataaaaacgtgatttaagtcacaattatctggctgcctgtgggcaccggataagtttagaacaaaagtgtacgcttcattgttaatgttttgttagaattggagcgaaagtagtccattgcaaagcgagatgtaagcccatggcgaataaacccaccccggaagagctgaaaaatggcttgagcgaaatgcagttttacgtgacgcagcatcatggcaccgaaccgcctttcaccggacggctgttgcacaacaagaaaaatggcgtgtaccactgcctggtgtgcgatgcgccgctgtttaactcccagactaaatacgactccggctgcggctggccgagcttctacgagccggtaagcgcggaggccattcgctatctgaccgacaattcgcacggcatgcagcgcattgagatccgttgcggaaactgtgatgcccatctcggccacgtgtttccggatggtccgcagccgaccggcgagcgctattgtgtcaactcggcatcgctgagcttcaccgatgagcaaaatggcgagcaaatcaagggttgaagaaacgattcagcaaattattccaggcggaggtgagcggaagatggatattgagcaaattatcgacagtatgacgccggaagtgtatcagcgtctggcgacggcggtagagctgggaaaatggccggatggcgtcgcgctgacgccggagcagaaggaaaatagcctgcagctggtgatgctctggcaggcccggtataacaccgacgcccagcacatgaccatcgacaccagcgggcagatggtaatgaagagcaaacagcagctgaaagaggattttggcatcgtgccgaagccgatcgccaccgttaaactgcaataaaccgccggccggcggtgagacgttccggcgtcgggtaaccgcgcgccggatggcgtcatgtcgaatgaccgcgtccggcggtcagccgcttcgcttactttttgttcatcatcgctttcagatcggcaaacgggttgtaggtggcctcgccgacgctcttttgcgcatcttcccctgccaccaccgtggagccatactgatcggcttcggtgtacttggaatgttcgtgatcgtgacagtacaggcacaacatctcccagttgctgccatcttccgggttattggagtggtcgtgatcgatgtggtgcaccgtcagctcgcgcagattggagtagacaaactcccgtgagcagcgtccgcacacccagggaaaaagcttgagcgccttttcgcggtaacccacttccagacgtgcgtaatttttggggatataggccatggccccctgcctcctgtcaaacggttaagctgcgccaacccctggcgcagcggataacaggcatcataacctatcccgggcggcgcgatatacctgcattgcaggcgatgctgcctgcgtcacgcctctcggtgccgacgatgcggcggaacagccatgattagtgtttgatccccagcgattccgccagctgacgggccagctgattctggtcatcggcgccatattcccagaacatggccccggcgaggcccttcgccttgatatagtccgccttaatggctaccgagcgcgggttctcataggagagggcgaacagcggcttgccctccgcggactgcaccgacagccacggaaccttcgcctcatcgtcccagtgctcggtaaaacgcttttgcggatcgttgagcagtttgcccacgatatcattgtatttcacgtaggtgtctttgctcaggtcatagcccagcgaggcaaacagcgcgatctgttgcggcccaaaatagggctgggtgaccggattgttttgcgcatccgctttcgtccagtcaatccccggctcgaccgcccgtttcggtacccggccataaaaaccaatcccgaggttcatctggctgggtttaagcccggcggccaggtaattgttgaccacaaaatcggcgctgtatttatccgctgcggcgaccgtcggccagtggctggagtcatacagattcgagttgaagtactgcgtgccgtaggccatgtcgtaggtcatcaggttgatgtagttcagcaccggggccaccgctttgacgtccacccagcttttcgggctctcggcattggcgcctacggcgatagtcaccagcttttgctcaccgactgcctcacgcagcgatttcagcagggcagtgaagttgtcgcggtcagccggctggctggccaccagtccccaggcgccgttgaccggaaactcccagtcgaggtcaatgccgtccagaccatattgctggatgattttctgcgcggaacgaataaagacggcgcgactttctgcggtcgccgccgcgccggagaaaccacgcgcgccccagccgccgaccgacagcaggactttgaggtccggattctgtttacgcagggcggggagcttttgcagatccgcctgcaccttcggcgacagccagatctcgtgcagatgagcaggatccttcagggccgcattggtctcgtctttttcatcgttatagataaggccaaacgagtagttgagatgggtgatctgccggacgtccagcttatcgatatcaccgcccggcccggcggtgacatcgccgccgccgttaaaatagccgacggacatcagcggttgggcagagagcgcggaagcgcaaagcaagggcaaagctgccagcaagggcaaacgtttcatagtggttcctctttgacataaaaataaccacgccacggaaagggcgtggcgaaaaaacagccttgccagactagcagcaataacctgttgaaactgcgagagagttcaatttatggacgatagcgaggcggcagaaggcatcctttagtggtcagtcattgtcattccttcattttctcataatgaaatttgctgtatttgtgatctgagttgtgaaatgcagatctatatctgcgttttaaagatttaatgttgaccttgaagattgtgtggttaagtatgacgaccattgaagcaaaaccacaaatcaacaaaggaagacgcaatgaaagcactggcaagatttggtaaggcctttggcggctataagatgattgatgtaccggagccgatttgcggcccggatgacatcgtgattgaaatcaaagcggcggctatctgcggcgctgacatgaagcattacaatgttgatagcggatcggatcaatttaactccatccgcggccatgaatttgccggacaaattgtccgcatcggcgacaaagtcaaggactggaaagtcggtcagcgggtggtttctgacaacagtgggcacgtgtgcggtgtatgtccggcctgcgaacaaggtgattttctgtgttgtacagaaaaagttaatttaggacttgataacaacacctgggggggcggattttcgaaatattgcctggtgccaggtgagattctcaaaattcaccgccatgcactgtgggagatcccgcagggcgttgattatgaagaagccgcggtgctggatcctatctgtaacgcttacaaatctattgctcaacaatccaaatttctacctggccaggacgtcgtggtttttggtaccggtccattagggctcttttccgtgcaaatggcgcgcatcatgggggcagtgaacattgtcatggtcggactggaagaggatgtcgcggtacgcttccctattgccaaagagctgggggcgacagcggtcgtcaacggttcgaccgaagatgtggtcacgcgttgccaggaaatctgcggtaaagacaacctgggcctggttatcgaatgctccggcgctaatattgccctcaaacaatctatcgaaatgctgcgccccaacggggaagtggttcgcgtgggcatgggtttcaaacctctcgatttctccatcaacgacattaccgcgtggaacaaaagcatcattggtcatatggcctacgactccacctcctggcgtaatgctatccgcttgctggccagcggtgcgatcaaagtcaaaccgatgatcactcaccgtatcggcctgtcgcaatggcgcgaagggtttgacgctatggtcgataaaaccgcgattaaggtcatcatgacctacgactttgatgaataagcccatttattaaaggaaggttcccggatggaacatatagcaaaaccgcattgtggcgcgaggctggatcgactgccagattgtcgctggcattcgtcaatgtttgccatagtcgccttcggattactggtctgctggagtaatgccgtaggcggattaattctcgcgcagttaaaagaacttggctggaccgataattccaccaccgctacgttttccgccattacgactgcgggaatgtttctcggcgcgctcggtggtgggatcattggcgataaaatcgggcgtaaaaacgcatttattctgtatgaagcgattcatattattgccatggtcgttggggcgttttcaccgaatatgaccttcctgatcgcctgccgttttgtcatgggggttggattaggggcgctcctggtgaccctgtttgccgggttcaccgaatatatgcctggcagaaatcgcggcacctggtcaagccgggtctcgtttatcggcaactggtcttatccgctctgttcgctcatcgccatgggattgacgccgttaattagcgcagaatggaactggcgagtacagttattgatcccggccgtactgtcgctaatggcgactattattgcctggcgtcgtttcccggagtcgcctcgttggcttgagtcccgcgggcgctacgccgaagctgaaaaggtaatgcgtgccattgaagaaggggttgttctgcagaccggcaagccgctaccgcctgtggtaattgaagatgacggcaaagccccgcgcgcagttccttattcggccttattaacaggtgtgttgctgaaacgcgttattttaggttcctttgtcctgatcgccatgaacgttgtccagtataccttaattaactggctgccgacgatatttatgacccagggcattaatcttaaagactcgattgtcttaaacacgatgagtatgtttggcgcgccgtttgggatttttatcgccatgctggtcatggataaaatacccagaaaaactatgggggtggggctgttggtattaattgccgggctgggatatatctattctctgcaaaccagcatgctattaattacgttaattggcttctttctgattacgtttgtgtatatgtacgtttgctacgcctcggcagtctatgttccggaaatatggccgacagaagcgaagcttcgcggttccggtctggcgaatgcggttgggcgtatcagcggtatcgccgctccttatgcggtcgcggtattgcttaacggttatggcgtgacgggggtatttgttctgctgggaaccgtctccattattgtcgccattgccattgcgaccatcggaattgaaaccaaaggcgtctctgtcgaaagtctcggtattgatgcagttaccagcaaataatattgacgggaaataaaatgaaaaattcaaaagcgatattaaaaaccccgggtacgatgaaaattattgccgccgatatcccggtacccaaagagcatgaagtgctgatcaaagttgaatacgttggtatttgcggttcagatgttcacgggtttgaatcgggcccttttattccgccgaaagacccaaaccaggaaattggtctcgggcatgaatgtgccggtacggtggtggcggtgggaagtcgcgtcagtaaatttaaaccgggcgaccgggtgaacattgaacccggcgtgccgtgcggccactgccgctactgtctggaggggaaatacaacatctgccctgatgtcgactttatggccacgcagcctaactatcgcggcgcgctaacccactatctatgccatccggaaagcttcacttacaagctacccgataacatgggcaccatggaaggcgcgctggtagagcctgcggcggtagggatgcatgccgcaatgctggctgacgtgaagcctggcaagaaaatcgtcatcctgggggccggctgtattggcttaatgaccctgcaagcctgtaagtgtttaggggcaaccgacatcgccgttgtcgatgttctggaaaagcgtctggccatggccgggaagcttggggcgacgaccgtcatcaacggtgcgaaagaggacaccgtcgcccgctgtcagcaattctccggcgatatcggggcagacattgtttttgaaacggccggctcggcgatcaccgtgaagcaggctccgtatctggtgatgcgcggcgggaaaatcatgatcgttggtacggttcccggagattcggcgattaattttctcaaaattaaccgtgaagtctcaattcagaccgttttccgctatgccaaccgctatccggtcaccattgaagccatttcctccgggcgtttcgatgtcaagtcgatggtgacgcatatttatgattatgaagatgttcagcgcgcgtttgacgagtccgttaacaacaaacgcgaaattatcaaaggcgttattaaagttaaccattaatttattgaaaagggagaagcaaccatgctggccgatattaaatattgggaaagcgatgcccagaataaacattacgcgattgcccactttaatgtttggaatgcggaaatgttaatgggggtcattgatgcggcagaagagtctaaatcgccggtaattatctctttcggtaccggttttgtgggtaatacctcgtttgaagatttttcgcatatgatggtatcgatggctaaaaaagcctcggtgccggttattacccattgggatcacgggcgtagcatggagattatccacaacgcctgggtccatggtatgaattcgctgatgcgcgatgcctccgcctttgatttcgaagaaaatattcgcctgactaaagaggcggtggacttcttccaccctctgggcattccggttgaagcggagttaggccacgtggggaatgaaacggtttatgaagaagcgttggcgggctaccactatactgacccgagccaggcggcggagttcgtcgaacgtaccggctgcgactctttggcggtggcaattggtaaccagcatggggtttatacctcagaacccaaactgaattttgaggtggttaaacgcgtacgcgaggcggtatccgttccgctggtgctgcacggcgcgtccggtattagcgatgcggatatcaaaaaagctatttcattaggcatttcgaaaatcaatatccataccgaactgtgtcaggcggcaatggcggcggtgcaggagaatcagaatcagcctttcctgcacgttgagcgcgaggtccgcaaagcggttaaagtgcgcgctatggagaaaatcaaactgtttggctctgacggtaaagcggaatgacaatatggagaatatcgaggttatttgtatcggggcagctattgttgatattccccttcaaccggtgagtaaaaatatctttgatgttgactcttacccattagaacgcattgccatgaccacgggaggggatgcgattaatgaagcgacaattatttctcgtctcggtcatcgcacggcgttaattagccgcgtgggcgatgacgcgccaggacattttattgtcgatcactgtcggcgggagaatattgatattcagagcctgaagcaggatgccgatattgatacttccattaatgtgggtttagtcaccgccgatggtgaacgtacttttgtcaccaatcgcaacggcagcctgtggaaactaaatattaacgatgttgatttagaccgcttctcgcaggcaaaggtgctgtcgctggcgagtatttttaatagcccgctgctcgatggtaaagcgttaacggagatttttacgcaggcgaaagcgtatcggttaattatttgcgccgatatgattaagccccgccttaacgaaacgctggaagatattcgccatgcgctgagctacgtggattatctgtttcccaactttgaagaggcgagacttctcaccgggaaagagacgctggatgaaattgccgacagcttcctcgactgcggcgtgaaaacggtagtgatcaagaccggcaagagaggctgctttatcaagcgtgccgatatgaaaatggaggtccctgcggtgtcgggaattaccgccatcgacaccatcggcgcgggggataattttgcctcgggatttatctccgcgctgcttgaaggcaagccgctgcgcgagtgcgcgttgtttgctaacgcaacggccgcaatatcggtactgagcgtgggtgccacaacgggcgtgaaaaacagaaagctggttgaacaacttctcgacgaatacgaagggtaatagcggcagatgaaaatgattcctttaggcagtacggatattaaactttcccgcatgggattagggacatgggctattggcggcggtccggcatggaacggcgatctcgatttgcaggtttgcatcgataccattgtcgaggcgcatcgctgcggcattaatctgattgataccgcgccgggatacaattttggcaacagtgaagtgattgtcgggcaggcgctgaaaaagctgccgcgtaacgatatcgttgtcgaaaccaaatgtggcatcgtctgggagcggacgggcagcctgtttaacaaagttggcgatcgtcagctgtacaaaaatctcacgcctgagtcgattcgcgaagaggtggaagccagcctgcaaaggctgggtatcgacaccattgatatctatatgacccactggcagtccgtagagccctgttttacgccgattgcggaaactgtagatacgctgaacgcactgaaaaaagaggggaaaattcgttctatcggtgcggcgaacgtcgatgccgggcatatcagggagtatctcaaacacggtgagctggatatcatccaggccaagtacagcatccttgaccgggcgctggaaggtgaactgctgccgttatgccggcagaatggcatcattgtgcaggtctattcaccgcttgagcaggggctgttgaccgggactatcggccgggattatgttcccggcggcgcgcgggctaacaaagtctggttccagcgggaaaatatgctgcgggtaatggatatgctcgaggagtggcggccgctgtgtgcaaaataccactgcacgatccccgcgctggcgctggcgtggattttaaaacagagcgacttaatcaccttgctgagtggcgcaacgtcaccagagcaagttcgcgagaatactgatgcattaactatcgccttgactgatgaggattcactattaatgcgtgaaatggcagtagcgctggatacgaagtaacgggagaacggcctggcctctgtttctgtgtaatagagtattaaaatctgtgattcagacaggttcttttgaaaataaacatagcctgtgagatactacggtcttattattacgttgcaggaaacagaggtgttatcgtggcggcaaaagacaggattcaggccatcaagcaaatggtggctaatgataagaaagtggtggtttctcatttaagctcaatttttcaggtcacggaggaaactattcgccgcgatcttgaaaagctcgaagatgagggttttctgacccgtacgtatggcggtgcggtattaaacaccaccgcattatccgataacattcatttttataaacgcgcaaagtctttctttgaagagaaacagaccattgcccgtaatgcattaccatttattaagaataaaaccactatggctgctgattccagcagtacggcgatggagttattaaaactgctgaaggaaagaaacgatctcacgctgttaaccaactcggcggaagcttttcacgaactggcgcagtcggaaattaacgttgtttctaccggcggtgaactgaataaaaatacgctgtcgctgcagggaagaatcactaaggaaattatcagtcgttatcacgttgatattatggtaatgagctgtaaagggctggatatgaagaacggagcgcttgactccaacgaagcagaagcggaaatcaagaaaacgatgattcgccaggcgacggaagtggcgctgttggtcgatcactctaagttcgatcgtaaagcttttgtccagttggtagattttagccatattaattaccttataaccaataaggcaccaggtgcggaatggatagcattttgtaaagagaataatattcaactcgtttattagctttattgctattccgattaatattattttagtttgcgcttgggtaatgccataaaaatttaatgatgatggatggcgcggcaaaagtgactctgccgctgtcgccatattttatattttagctgaaattgaggcatcctgatggaacaatgtgaccctatcggcgcaagattagaccgcttacctttatcgcgatttcattttcgtatttttggtatcatcagttttagtttattaatcaccggttttctcagctattctggcaacgtggtgctggcaaagttagtcagcaacggctggtcaaataattacctcaatgcggcatttacctcagcgctgatgtttggctattttataggttcgctaaccggcggttttataggcgattatctcgggcgacgtaaggcatttcgcctgaatttgctgatcgtcgggatttcggcttgtgtggcaacctttgtgcctaacatgtactggcttatcttttgccgctgtctgatgggctgcggaatgggggcgttaataatgataggttatgcttcatttaccgagtttattccacccgcagtgcgcggaaaatggtccgcccggctctcttttgtcggtaactggtcgcccatgctatcggcggctattggcatagtggtgattgcttttttaagctggcggataatgtttctgctcggcggcgcggctatgctgcttgcctggtatctgtcgggaagatattttattgagtctccgcgctggctggcgggtaaagggcagcgaagcgcggctgaaaagcacctccagcaggtagagtcgcaaatcgagaaagagaaaaacattatcttaccggcctggcaaagcgcggaacatagggcggaggtgggtgtggaaagcggctctttctggttgttgtttaaaggccacatgctgcggcgaacgctggtggcaattacggtgctcatcgcgatgaacatttcgctctatactattacggtgtggatcccgacaatttttgttaattcggggatcgacgtgacaaagtcaatcttgatgaccgcgattattatgattggcgcgccggtgggtatatttatagccgcgctgattatcgaccgttttccgcggcgattgtttggctcatcgttgctgattattattgcgcttctcggctacttctattcgattcaaaccgcagagtgggccatcttaaggaaggtgcgaacaagttcctgatatgagatcatcatattcatccggagcgcatcccagagggacatcatgagccatcaactcaccttcgccgatagtgaattcagcactaagcgccgtcagacccgaaaagagattttcctctcccgcatggagcagattctgccatggcaaaacatggtggaagtcatcgagccgttttatcccaaggcgggcaatggccgacggccctatccgctggagaccatgctgcgtattcactgcatgcagcattggtacaacctgagcgacggtgccatggaagatgccctgtacgaaatcgcctccatgcgcctgtttgcccgattatccctggatagcgccctgccggatcgcaccaccatcatgaatttccgccacctgctcgagcagcatcaactggcccgtcaattgttcaagaccatcaatcgctggctggccgaagcaggcgtcatgatgacccaaggcactttggtggatgccaccatcattgaggcacccagctctaccaagaacaaagagcagcaacgcgatccggagatgcatcagaccaagaaaggcaatcagtggcactttggcatgaaggcccacattggtgtcgatgccaagagtggcctgacccacagcctagtcaccaccgcggccaacgagcatgacctcaatcagctgggtaatctgcttcatggagaggagcaatttgtctcagccgatgccggctaccaaggagcgccacagcgcgaggagctggccgaggtggatgtggactggctgatcgccgagcgtcccggcaaggtaaaaaccttgaagcagcatccgcgcaagaacaaaacggccatcaacatcgaatacatgaaagccagcatccgtgccagggtggagcacccgtttcgcatcatcaagcggcagttcggcttcgtgaaagccagatacaaagggctgctgaaaaacgataaccaactggcgatgttattcaccctggccaacctgtttcgggtggaccaaatgatacgtcagtgggagagatctcagtaaaaaccggaaataacgccagaaatggtggaaaaaatagcctaaataggctgattcgatgtgtttgcgggaaaaaaatcggcccagatccgcgaaattttaatcagcgagtcagcttgggaagaaatgacctgcttattcgcaccttccttaagctatggcctggtgatgatttttttcctgtacatgtacgtctgctttgcctcggcggtgtacgtgcctgagttgtggccaacgcatctccggttgcgcggttcaggctttgtcaacgcggtagggcggattgttgccgtctttaccccctacggtgtcgcggtcctgttgacccgctccggggcgattacggtttttatggtgctcggggtaatgctggtgctctgcgcgctaatcctgttctgctttggcatcgaaacgcgcaagatctcgttggaggagatttcaacgctggcctgagaaaagcgccgacaggaagaatgcctgtcggcacaggttacgcgtgggtttcccgccagtcgtcgagggtatagagcgtggcgcccgcggcggccatctccataaacgcctggctgctgtcctgcggctgcagatttacgccgcgacagccgtcggtgatgacgttgaccgcgtagcccagcgccagggcatccagcacggtgaacttaacgcagtaatcggtggcgaggccgagaacggtcagctccacgatcccctgaccacgcagccagccgtccagttcggttttctgccggtgaccgttgtcaaagaaagcgctatagctgtcgatgctccggttttgccctttgtggaacacagcggcgatcgcctgctgcttgagcagaggatgcagcgccgcgccttcgctgtgctgcacgcagtgatccggccagaaagtttgcgccaggccgtccagctcgccctcggtgtagggttccacctggtgctggctggcgaaactgccgtgatccgccggatgccagtcctggctggcgacgatgggctcgccgcgcgccaggctccagtcgataagcgcattggctacgtcgacggtactgtcgccttcaggaaccgccagcgcgccgccggcgcaaaagtcgttctgcaaatcaaccagtaacagcgctcgatgtgccatacgtcctccttaagcctcgtcgggggtgagttcgccacgcagattttgctgcatcgccgcgcgaatggcgtcaacgtccagctgctggctaagcagatagtgtagcttggtcagcgtcgcttccaccgtcatatcgaaaccactgatgacccccgcctgggcgagggcgttgccggtggcatagccgcccatgttcacctttccggacatgcactgcgtcagattgaccaccacaataccgcgctggctggcttccgccagcacctgaataaactcgccattctgtggggcattgccgacgccataggagcggaggatcagcgctttcaccggttggcgcagaaaattacgcaccacgtcggcggagatgccggggtaaatcgtcaccacgccaatcggctgcggagtgatggggtgcacgataagatctccgctgccctgcggcgccggcggagtaccgagacggcgaatatggatcccggcctccagcagcggggcaaggtttggcgaggcgaaagcgtcgaagccgtcggcatgggctttggtggtgcggttgccgcggaacagtcgattgttgaagaacagcgccacttcgttaatcggatagttggcggcgacgtacagggcgttgagcaggttaatctgaccatcggaacgcagctcggccagcggaatttgtgaccctgtcacaatgaccggcttgccaaggttttccagcatgaacgacagcgccgaggcggtaaacgccatggtgtcggttccgtggaggatcacaaagccatcatactcctcataatggctgcggatatcgtcggcgatgtgctgccagtcctcgggggtcatatcggatgaatccatcagcggatggtattcatggatcgtgaagtccggcatctccggacgatggaactccggcatcagcgccagctgacgctgcagatggccggaaacgggtacatagccgtgttcagagcgctgcataccgatggtcccaccggtgtaggcaacgtaaatcgattttttttgcatagcatcgcttaggttggtcgtagacaggcgcagtataaagagacgcaggaaaaaatacagcgtcggtcgcgggctttgtggcagtgttggcaggagagggaaaaaggctgccccgggagacggggcagccgctgcgtattaacggatgttagcgcaggtcaggcagaaggcatagcgattctgcgggtcgttaaacgccgccagcttgtcgctctccgctttcaccgtctcggccgccgcggcgaccggcgcaggcagccaggcctgaatggccgccggcagcgaggcgcgtaccgagccggtcaggctatccagcaccatcgagaagaaggtcggctcttcctgatagtagttgaggtgccaggttttcagcttcgccagctcggcggctttggccaccgcgtcgtcgaagtcgccgaggctgtcgaccaggccgttggctttggcatcttccccggtccagacgtggccctgggcgatctggtcgattttctccggcgtgctcttacgggcgttagccaccagggtgataaagcgctgatagccattctcaatgctcaactgcatcagctgctgcacttccggcggcagcgctttggtgctggagacatccgccagcggcgacgtggcgacgccgtcggtgtggacgccaatcgacccgagggtattttccacggtgttgatcaccccaaagatgccaatggagccggtgagggtgcttgggttcgccacgatgtaatccgctggggtggagatccagtagccgccggacgccgccatgccgcccatcgagaccactaccggtttaccggcggctttggctgccgccagctcttcacgaatgatttccgaagcggttacgctgccgcccgggctgtttacgcgcagaacgatggccttaattttcggatcgaggcgcgcatcgcgaatttgcgctgcggtggtatcgccgccgacgttgcccggggtctcttcaccgtccatgatggcgccgttggcgaagattaccgcgatggcggaaccctggtcagacggcgtcttcacgttgtagtcgtaatagctgatcgcccggtaattgttatccgctttgctccagccaaactgtttggtcagcgccttttccacttccgtggaggtcgccagctcatccaccagcttattgtccagcgcatatttcgccgtatcgccgcccaccttacgcaggccatcgatgatgccctgggcgcccgggaagagctgctgggcggtgatctggcggttggcggcaatggtgttgaggtagttctgccacagttcgccaatccagcggctatccgcttcgcgggcggcaggggacatatcatcgcggatgaatggctcgacggcggatttataggtgccgacgcggaagacatgggtggagaccttcagcttatccagcagcgatttgtaatatagcccgttggtagcgaagccgtgcaggtctacctcgccctgcggcgagagccagattttgttggcgaagctcgccaggtagtactggccctggctgtagctgctgccgacggcatacaccggtttgccgctatcgcggaattcgcgcagcgctttgccgatgtactgcatggatggctggtcgccgccgacgaagtttttcaaatccagtacaataccggtgatattgcggtcatccttcgcctggcgaatggtctgcacgatatcgaacagggaattctcctgcagacggtccgagctggcgccaaacagctggcggccaatcacgccgagcttgctgctggcggatggtttatccaccaccacgccggtaatatccagcaacagcgcgccgcgcgcggcatgttcgctggtggtgctgctgaactggctccagatgccgatacacaccagcaccagcaccaggaagatcgcattgagggccagtttgcgaataaagttgagtatccgccacgtccatttaaaaaagctggcaatcagtcgccaaagggttcgcatgtcttctccctaacgttatctaaaaagggcaggccgcaggggccgccgcgtctggctatcctaaagagtgagccgtcggttgtcagcaggaatcaccgaccgcgctgtaacaaaatccttgtgcatgttaattttatgaaaaatgacatcacaggagttatacagatggatgctctcgatctactgcttaatcgccggagcgcttcccgcctggcggaacctgccccggcgggcgaacagctggaaaacattctgcgcgccgggctgcgcgccccggatcatggcaccctgcagccgtggcgcttctttattatcgccgatgacggccgcgagcgcttcagccagttgctggaaaaaggggccagagaggccggccaggatgagaagggaattgagaaagcccgcaatgcgccgttccgcgcgccgctgattattaccgtggtcgcgcgctgtgaagaccaccctaaggtgccgcgctgggagcaggagatgtccgctggctgcgcggtgatggtgatgcagatggcggccctggctcagggattcaacggtatctggcgcagcggagcattgaccgagagtccggtggtgcgggccggcttcgagtgccgcgaacaggataaaattgtcggcttcctctatctggggacgccgcagctaaaagcctcaaccaccattgccctgccggataccgcgccgtttgtgacgcgattctgagtcggtgcttattatgccgggtggcggctggcgccttacccggccaacgcatccggctctgactgtctgtaggcccgcgcaagcgcatggactgcaccccaaaagttggacacccaactgagtaaggtgcaattttatggctaaaccaaagtattcccctgaaacaaaactggctgtggttaatcattatttgtccggtaaagacggagaacagagtacagccgacctttttggtattgaaagaacatctgtccgtcgctgggtcagggcatggcagttccacggtgcagaaggcctgactgcaaaaaataatcattattccgatgaatttaaactcgtggtcgtccgggcggttatcagtgaccgcctgacgatgcgtgaagcggctgcccggtttaatctctccgcagaaatacttgtccggcgctggctcgacgtgtacaacgatgccggagcggaaggtcttttaaacatgcaatgcggacggcccggacaaatgacaaagccaaaaaatatcccaccactgacagataaagagctggaaaaactctcccccgaagagctcagggccgaactgcgttatctgcgggcagagaatgcctatctaaaaaagttgaaagccttggttcagagcgaaaaaaatggcaaaaagccctgataatcagtgaactaaggcatgaacacgctctgcgggaccttctgcgggcggccggtatgtcccgtagcacgtggtattacaatatgaatgcactgaagcaaggggacaggtatgcgggtcttaaagagaacatcaggaagatataccactatcacaaaggtcgttatggctaccgcaggatcacgctcgcactgagaaaacaggggctccggataaaccataaaacagtgcagcggctgatggcagaactgtcactccggtctgtgataagggcgaaaaaatatcgtgcctggaaagggagaacgggcgaggccgcgcccaatatcctgagccggaacttcggtgcgtcaaaagccaacgaaaaatgggtaacagatgtgacagagttcccggtacagggaaaaaagctttacctgtcgtcagttctcgatctgtttaaccgggaggttatcgcctacagcctgtcggaaaggccggtgatggagatggtgaatacgatgctggacggtgcgttcccgaagctcagaccgggagatgctccgctgctgcactcggatcagggctggcattacaggatgaggagctatcaggaacgtttaaaggcgcatgggatgacgcagagtatgtcgcgtaaaggaaactgcctggataatgcagtgatggaaaacttcttcgggaccctgaaatcggagtgtttttatctgagggagttcaggagtgtcagtgcgctaagaaaagccgtagaggactatatccattactacaacaacgagcggataagcctgaaattaaaaggcctgagtccggtagagtaccgaacccaggctctgagagccgcttaatatgaaccatccaactttatggggtcagtccagcagcgccgccgggcaaggacagcgggcacggagccgattttgtgccgggtggcggctgcgccttacccggcctacgttcgtacgacctgtcgttaatttattcacttttcttgctgaaactgccggtgctgacggcctcaaaatcgctgagacgttcccggcaggccggggcagcccgcatggatgcgggctgagggccgtgttttgcagggacgctgcctcggcccgacccgaagcctgcagggataagtcgaagggaccgcgcagcggcgattttgctggccagagcccgggggtacagggggcgacggtgactggccgccccctgtgcgctcccggcgccatgagtgacataacgcagacgattaaccgggagcgcaaactacgctgaagccacagataacataaacaaccacactgcagtgcttcccctcaccctggccctctcccggagggagagggaaccgtccggctggccgcgcaagcgcagcgccgccgggcgatggcagcaggctcggagccgcatctatgccgggtggcggctcgcgcctgacccggcctacaacccctaccattcgaatcaatcgcggtttttgtagcccggacaaggcgcgccaggcgccgcatccgggaatgcaacggcgatgacgttacttctgccttttcgcgaattcatctttggctttctgcaactgctgctggaaggccgggttggtgtgcagcgtagcgaccaccgcggagccgacgatgcgcgccgcatcgacatcgctctgccagtgatagccgcagatcacccggctctcgccgagctcatagccgcgcttcaaaatttcgttttgccgctgcgggttgatctccgccagcaccagggcggtggcccagccgatagaggtatgcccggacgggtaagagccgtttttcgccagcttgtcctgttcggtggtattgcaggtggagacgccatagaacgcaaacgggcgaatgcgcatgtatttctctttcgcgctgcgggtcgccaggtcgccggcgtcttcaatcatattggtcagcagtttgtgaagctgcggcgcgtctttctcggtgatcggcgaaccaaaggcgctggagaaggcgttggccacgccgcccgcgctgaggttggcatcctctgccgccagcttcccgcgctcggtattgcgcagcagacgtccttgctcatacatcgcctgatcgtttaaaaatgcgatactgcccaccgccggcggtggtggcaacagcgccaggctgtcgatggcctgggcattggtcagatagtagagatcgggcttggtggtgacatcgttcccggggggaaccagagcaaaggcgttaacggagaagaaactggccaggcaaagggcaagaacacgctttttcattagaatttccttacgtcataatcattccagagaagacagtcctgtgctgtcacatttctgtcatctttaagtaaaagtgaaaatggtcgggaaaaaattgccgtgtctcgcaaaaacggctttttgtctgcttaatgagcaaccatacgcgatttcagactgtcgtacttaccaccctggcgtttgggcgctaacatagcgggattgcaatgacaggagatgtccatgagcgagcaagccattcgtttaacgcaatacagccacggagccggttgtggttgtaaaatttccccgaaagtgctggaaactatcctgcatagcgagcaggcgaagtttgtcgacccaaacctgcttgtcggcaacgaaaccagcgatgatgccgccgtttacgatctcggtaatggcacctcgatcgtcagcaccaccgatttctttatgccgattgtcgataacccgttcgactttggccgcatcgccgctaccaacgccatcagcgatattttcgctatgggcgggaaaccgattatggcgattgccatcctcggctggccgatcaacaccctggcgccggaaatcgctcgcgaagtggtggagggcgggcgctttgcctgccagcaggcggggatcgcgctggcgggcggccactccattgacgccccggagccgatcttcggtctggcggtcaccggcgtggtgcccaccgagcgcatcaagaaaaacagcaccgcccaggcgggttgcaaactgtatcttactaaaccgctggggatcggcgtactgaccactgcagagaaaaaatcgctgctcaagccagagcatcaagggttagcgacggagaccatgtgccagatgaacctcgccggcgccgcgtttgccaccatcgacggggtgaaggcgatgaccgacgtcaccggctttggcctgctcggccacctcagcgaggtgtgccgcggggccggcgtgcaggcgcagctgcgctatgccgatatcccaaaactgccgggggtggaggactatatcgccgccggcgcggtgccgggcggcaccgggcgcaactttgccagctacggccatctcatgggcgagatgccgacggagtggcgggatctgctgtgcgatccgcagacctccggcggtctgctgctggcggtgaccccggaggcggaggcggaagttcaggccgccgcggcggagttcggcattaagctggccgccatcggcgagctggtgaccgcccgcggcgggcgacccatgatcgagatccgttgattcgatgcggttgtttattgcagaaaaaccgagtctcggtcgggctatcgccgatgtgttgcctaaaccgcaccgcaaaggcgatggctatattgagtgcggcaacgggcaggtggtcacctggtgtatcggccacctgctggagcaggcgcagccggacatctacgacagccgctatgcccggtggaatctcaacgatctgccgattgtgccggagaaatggcagctgcagccaaagccctcggtcaccaaacagctgaatgtcatcaagcgcctgctcggcgacgccgaggaggttatccacgccggcgacccggacagagaagggcagctgctggtggacgaagtactcgactacctgcagctggcgccggagaagcgtcagcaggtgcagcgctgtctgattaacgatctcaacccgcaggcggtggagcgggcgatcaaccgtctgcgcgccaacagcgagttcgtgccgctctgcgtgtcggcgctggcgcgggcccgcgccgactggctgtacggcatcaatatgacccgcgcctacaccctgctggggcgcaacgccggctatcagggggtgctctcggtggggcgggtgcagaccccggtacttggcctggtggtccgtcgcgatgaagagattgaaaatttcgtcgccaaagatttcttcgacgtgaaggcgcatatcgtcacgccgcaggaggagcgttttgtcgccacctgggtgccgagcgaagcctgcgaaccttaccaggatgaagaagggcgcctgctgcatcgtccgctggccgagcatgtggttaagcgcatcgaaggccagccggcaatcgtgaccggctataacgataagcgcgattccgaacccgcgccgctgccgttctcgctgtcggcgctgcagattgaggcggccaaacgtttcggcttcagcgcgcagaacgtgctggatatctgccagaagctgtacgaaacccacaaactcatcacctatccgcgttcggacagccgctatctgccggaagagcacttcgctggccgccatgcggtgttgaatgcgattgccgtccatgcggcggacctgctgccgcagccggtagtggatccggagatccgcaaccgctgctgggatgataaaaaggtcgacgcgcaccatgcgattatcccaaccgtccgcagcagccaggtgaagctcaccgataacgaagcgaaggtgtacaccctgatcgcccgccagtatctgatgcagttctgccctgacgcagtgttccgcaaatgccagattgatcttgagatcgccaacggcaagtttgtcgccaaggcgcgttttctggccgaggcgggctggcggacgctgcttggcagcaaagagcgcgatgaagagaacgacggcacgccgctgccggtggtggccaaaggcgatgaactgctgtgcgagaggggcgaggtggtggagcgtcagacccagccgccgcgccactttaccgacgccacgctgctgtcggcgatgaccgggattgcccgcttcgtgcaggataaagatctgaagaagatcctccgcgccaccgacggcctcggcacggaagcgacccgcgcagggattatcgagctgctgttcaagcgtggtttcctgagcaaaaaggggcgctatatccactcctcggaggccggcagggcgctcattcattccctgccggagatggccgggcgaccggacatgaccgcccactgggagtcggtgttgacgcagatcagcgagaaacagtgccgctatcaggactttatgcagccgctggtggggacgctgtatcaactgatcgatcaggcgcgcagcacgccggtgcgtcagttccgcggcctggtggcgccgggcggggcgaagaagtcgttcagcaaaggtaaagggaagccgaaaggcaaaaaagcggcagacgataccgcgccgccgccgcagtaacccgccggtggtcgcgaggatgcgttaccccacggccaccgcttctccgccagtcaggccaatggtctacactaaacagccgggaagagcctggacgcggggcccctgagcaggggatgcccgctgcgcttttcctgatgccgatgccccatttctctcacaggcgataaggaggacccgtgaaatatattgctatcagccaaccgggcggcccggaggtattgcagatccgcgaaggggagatccccaccatcggggagcatgaggtgctcattgaggtgaaggcggcgggcgtcaaccggccggatattctgcagcgccagggtctgtatccgatgcctgagggcgtcacccccgtgcccggcctcgaggtggcgggcgtggttgttaaggtcggcgcgcaggtcacagcgtttacgcccggcgatcgcgtttgcgcgctgaccaacggcggcggctatgccgaatactgcgccgtgccggcaggccagacgttgccgatcccggcgggcctcagctttagcgaagcggccgccattccggaaaccttcttcaccgtctgggcgaacgtcttccagctgggtaagctgcagcctggcgaaagcattctggtccacggcggcgccagcgggattggcaccaccgcggtcctgctgtgccacgcgctggggatgaccgtctatgccaccgtcggccaggacgaaaaaattgctgcgctacgtccctatgctacggcgattaactacaaaaccgatgattttgccgagaaaatcggccagctgaccaacgatgaaggggtggacgtcattctggatattgttggcggcccttactttaaccgcaaccttgggctactgaaaaaggatggacgactggtcatcatcggctttatgggcgggcgaatcgctcatgaggttgatattcagactctgatgctcaagcgagccaccgtcaccggctcgaccatgcgcggccggacggcggcggagaaacaacagattgccgaggcgctgcgccgccacgtctggccgctgctagaggcagggaaatgcaagccgctgatctacgccagctacccgatggcggagattgccgaggcccatgcctgtctggacagtggtcagcatctggggaaagttgtgatcacgatgacgtcgtgagacgcatcccggcgggctgccgccgggatggagttaggggaggttaaatcacgccctgggccagcatagcatccgcaaccttcacgaaaccggcgatattcgcgccgcgcacgtagttggtctgcttcgcttcgccgccgtactgcacgcaagcgtggtggatatccagcatgatgtgatgcaggcgggcatccactttttccgctttccagcccatgcgcgcggcgttctgcgccatctccagaccggaagtcgccacgccgccggcgttggccgctttgcccggggcaaacagcacgccagcttccaggaacaggtcggttgcggcgatggtggtcggcatgttggcgccttccgccacggccttgacgccattggcaatcagctggcgggcggcatcgacgtccagttcgttctgggtcgcgcaaggcagggcaatatccaccggcactgaccacggctgctggccttcaagataggtgaggccaaattcgcgggcgtaatcggccacgcggccgtgggcacgctctttaatgtcgatcaggcgggtcagtttttctttggtgaagcccgcttcgtcaacgacggtgccgttggagtcggaggccgtcaccacccgcgcgccaagctccatcgctttctcaatggcgtattgcgcgacgttgccggagccggagaccgccacgcgagcgccttcgaagccgaggccgtgacgtttgagcatcgcttcggtgaagtagatcaggccgtaaccagtggcttccggacggatcaagctgccgccaaaggagagtcctttaccggtgaagacgcaggcgctgttgttggagagcttgcgcatcattcctgccataaagccgacttcgcgaccgccgacgccgatatcgcccgccggtacgtcggtatccgggccaaggtggcgatagagttcggtcatcagcgcctggcagaaacgcatcacttcgccatcgctcttgcctttaggatcgaaatcgctgccgcctttcccgccgcccatcggcagagtggtcagggcgtttttgaaggtctgctcgaagccaaggaatttgagaatcgacaggttaaccgacgggtgaaaacgcatcccgcctttatacgggccgatggccgagttgaactgcacgcgccacgcgcggttgacctggacctgattgcggtcgtccacccacaccacgcggaactggatcacgcgctccggttccaccagacgttccagcaaagcaagctgacgatagcgcggattttcctcaaggaaaggccacagggtggtcatcacctcccggacggcttgagcaaattcggtttgatgaggatcgcgctgttgaacgcgggtgagaaagccttccagagtgcacgtctgatccatagatatcagttccccttatggttgtggttgcatgtatttattatgattcggtccttgaaaaaaccgattttccgactataacaccgctaatccttaggcaagcaaggaaaaattgagccgacaacaaaatttataattgcccgctcgtcataactaaaagcgatgacgaggcggcgggcggatcagcggacggaaagggtggggcgctgggcgataaaggcgtgcagcagaggaatatcggccggggcgagatcgagggccagcgcttctgtgggaaggcaccagcgcagctgagtgtgatagtgggccagcggcgtgccctgaaagtgcggcacccaccaggcgtgaagatggatccggcggccggagacctcccgctgatggctagcgatatagcaagccgggcgggcgatgatgcccatctcctcctgcagttcgcggaccagcgcctgcggctggctttcacccggctccactttgccgccggcgaactcccacatccccggctggtcggcgtggggcggacgctgcgccagcagaatctggccatcctgttcaataatggcggcgacaacatcaatcatttttagcataagcatcaaggttaataagacgaatatggcctattatcaccgccatagaccgtaactgacaaccgccaaccctgctggagaccttcgtgcttgatagccacctgcatccgcgccttaaacccctgctaaacgctgtcgccggcgcccttgaccgccccggcatctcaccggacgggctgacgctggtcggttttgccatcggcgtgctggctctgccctttctggcgctggggtggtatggcgcggcgctggcggccattctccttaaccgcctgctggatggcctggacggcgctctggcgcggcggcgcgggctcacggatgcgggcggctttctcgatattgcgctggattttctcttttacgccctggtgccgttcggctttattctggcggatccgctgaacaatgccctggcgggcggctggctgctgtttgcctttatcggcaccggcagcagctttctcgcttttgccgccctggcggccaggcaccagatcgccaatcccggctacgcccataaatcgctgtactatctcgggggactgacggaggggacggagaccatcctgttgtttgtcctcggctgcctgtttccggcgcatttcgcctggctggcgtggctgtttggcgcgctgtgctggctgacgacggcgacgcgcatctgcagtggctaccagaccttaaagcgggtaacgaccacagcgtaaacggggtatcgcgcgtcgccgacaaagggcgacgcgctgaggcggggcgagttactgactgctttccgggccgcgctctccgcgggccaccggattgtgcgggttgctgctccattcgtaccagccgccgtcgtacaccgcgacgtgcggccagcccatggcgcgggcatacataaaggtttccgaggcccgccagccggtcccgcaatagaatgccacttgctggctcggcagaatgttccactggcgccacagggcagcgatatcgtcggcgctgcgcatggtgccgtccgggttatggaaatcctccatgtgcgtggagtcgctcccggcgtggccccagcgggcgccagcgatgtcgcccttcggattgatatagctgtagccgctggtggtgccgataaactccggccacgagcggacgctgaccagcgaggcgtcctgacgatgcagcagcccgcgggcttgttcggtatccagcatcagctgcggctggccggggatcggcgcgccgaaatcaggcgccggctgctgcgccggtggcataccgcgctctaccggcagcccggcgtcggaccaggtctgccagccgccgtcaagcaggcgcacgtctttgaccccggcgtacagcatgatctgcgccacccgcgctgcggcgtagacgtcgcgaccatagaggatcaccgtggtgtcatgccggatgccgtgcttcgccagcatcgccttcagctgcgcgtcggacactttattccacagcggttcgctctccacctcattggtatcgatatagcccgcgccagggatatggctcagcagatagagcttcggcgctccccaggcggcttcaaacactttccagtcgcctgccggggcggcggcgaccgctttcccttgctgtaggtcgtgcagccactgggggtagaccagctgttcaaagtgcggcagcttttgcagacggtcggtctggctcagcgcatcgctcagggtgctgagccgggtgaaacccgtttgtttcagccgcgccgcgacgctgacgttatcctccgggctgccgtacagcgcgatgggggtatcggactggagctggtgctgcttagcccaggcgcgcagctgatcgtcgctcatggcgccgagccagcgggcggaaagattgagggcctgcggctcatggccttccgggccgttggcgcgctgcggccagccgttgtaataagcgctcagccgggtgtcgatggccacgccgtgctgctgttgcaggtgggagagagtgagcgctggcatggtttcagcggcgcaggtagtggaagcagcaagccccatgagcagggcgagtgcggtcaattgagaaacacgtttcatcgaaatgcccgacggtaaaaagtggagggcgtattctccactcgccaggcgccgatttctttgcggtaacgcaggtttgcacgctattgtccttcattgccagcgctccatcgccaggcagcgccccgtcggcgggcagtcctcgcgatcgtgggtcaccaggatcgccggaatggcctggcgggccagttcttcaaagacccagcggcggaacccggcgcgcaggctggcatccaggcggctgaagggctcatcaagcagcaatgcctcggggcgcgccagcagggcgcgcagcaggctcacccgcgcccgctgcccgccggagagcgtggccggatcgcgcggggcgaagcccgccagcccggcgcggctaagcgcttcctccaccgcggtttttcgcgcctcgccgcgcacgttctccggcagcgccagctgtaaattttgcccgacgctgaaatggtcgaacagtaacgggtcctgaaacagaatgccgatgcgccgatgctctgtcggcagcgtatcgcaacgccgttcgttgagccacagctcgcctcgggcgcgaaaatcgccggacagggcgccaatcatccaggcaaacagcgttgatttcccgctaccggaggggcccatcagcgtcagcacctcccccggggctaccgaaaaggcgacctcctgcagcagcggctggcgtctcacgctcagggtcagatggtttacggttagcactagcgaagtcctcgtcgatagcggcctgccagccaggccagcagagcggtcagggtaaagcataccgccggcagcagtaattgccacagcgcctgagcggcgagcgtctgcgcctcgccgccgctgctgagcgccaccgcctggctggtgagcgtcggaattcggccagcccccagccatagcgttggcagatactgcgcgatgctcactgagaagcccaccgccagggcggtcagcagtgggcgagttagcgaaggcagggtcagcaaccagaaaatacgcgtggatccccagccgagcgtgcgggcgacaaccgtcagccgcggatcgcgctggcgccaggccgggcgcaaaataaacagcatccagggcaccacccacagcagatggccccacaggacggtccaccagtcaccgtcaagccaggcatacagcgccaaccggtactggccgtcggccagcggcagggccggcaggaccagcggtagccagacccagccatcgcctcgcgccgggccgcaggccagccacagcaggcagacagccgcgccgagggcgcaggccgccagcgccagcccaaggctgttgcccagagcatccatctgcggcggcgccgagcgcgccagccccgccagcaatagcgcgcccagcagaccgctcagcggcagcagcgccgccagcaggcggccgggcagggcatgaggatgcgggtgacgaacaccgcgcagatcgggctggtactggcgctgtagccgccatccgccccaggcgaccagcgccagcccgccgaggatcgccatcagcagcaggctggccagcgcccctttggcctgctgcagctcatcgccctggcttaaccattgccacgccagcacggcgagggtgggcggattgccgggccccagcaccagggcgacgtctaccgccgacaggctccaggcggtggtggccagcagcaccatgccgagggcgggcagcagggcgggcagcaccagccaacgcaggcactgccagcggccgtagccgaggctcttcagggcggtcgcctggtcggcgaggcgtttctctcccagcaggccatagatcacccacagcacaaaggcgctctctttcagggccatcgtcaggccaagcccgatgccgtaccggtcaaccggcggcgtcagaaacggcagccgctgccagagccaacccccttcggcgaacagcagcagcgccgccgtcgccagggcgagatggggcaccgccagcagcagcggcagacgggaagccagccgccgccagcgggccgaaggccagagggcggcgacgatggtcagggcgatcagcagcgcgccgccgacggataacagcgtggagacgagggtggcggccagcgcctggctcagctgcgggtcggcgaacagcgcccgccagttggccggggagcgcgcagcgcccaccagttccccggcggcggggagcagcggcagatagatcgccgccatcgccccccaggccagcaggatcagtgggtaccgtagcggcgcagccattcctgctccagcgcgtcaacccatgccgcgtgaggctcggcaagcaccggcggcagatcctgcggcagggctgccgccagcgcctggcgctggccgtcaggcagacgctgcggatccagtacgctcggatcgccccagacggcggcatcggccttgcgcaattgcgcctcaggggagagcaggaaattggccactactttggcgccagcgacagcgcgggcgttagccgggatggtaacgaaatggacgttgccgagggtccccgcggtaaagccgaagctgtagctgtccgtcggtaattcgccgctggcggctttctgccgggcgtgcagggggttaaacgtcagcgacaggcggagggtgccctggttgagcatggcgtccatccgcgccggcgacgccgggaaatccttgcccgcccgccacagggccgggtgcagcgcatcgagatagcgccacagcggggcggtgaccgccgcgaaggtcgttggctgcggcggctggcgcagggcggctggctggtcggtgagcgcgatcagcagttgctccagcagggcggtaccggtgaagtccggcggccgcgggtaggttacgctgcccggatgggctctggcgaaggccagcagcgcctgcgggctggtgggcggctgcggcgtttgcccgcggcgggcgataaacgtcagctgggcgctgccccacggcgactccgcgccctcggtggcgactgaaaaatcttcccgtaccggcttttgcagatcgacatagcgccagttgggcagcgattcggcccagccggtgagcagcaggttggcctgtttaagcgtgcgaaagttttcgccgttgatccacagcagatccactgacccgccctggcgacgaccggcctgcgcctcggtctggatgcgtttcactgcgtcggcggcgtcggcgacaggcacaatacgcaggtcgattgcgtaatagcgtttgacctcttcgctgacccacgccagatagcgattgacggccgggtcgccgccccaggcgttaaaccagacggtctgtccgtgggcttccgtctgaatctgccgccagctgtcgtcggcattaaccgccagcggccagagcagcagcaggcacagacagaggctgtaatcacgcaaacggcgcatcgttactccttattctgcgaggaagaggtgggtatctggcacaacccctgagccgggatcgccatcgcggcattgaaccgcgctgataaattttgcaggccgatcagggcggtcagctcggtgagcgcccgggcgtcaaaatgcgcggccatcgcgctacgcagggcatcatccaacgccggcggcgtctgggtggcggcttcggcataggccagcgccaggcgctctttttcgctgaacagcgtactgctgcgccagtcggcgaccgccagcagcttgtcctggctaccgctccgcgccgcgaggatcatgctggtgatatcgatacagaattcgcagtggcacagctgggcgatgcgggcgctgaccagcgagcgcagcacaggatccagcggcgagcggcggcgttcaatatagcccacgaacagcgaaaccaggtaaaacagccacgggatccgaccccaccagcgaatggggctcagcacctggccgtaatgccggcggtgcagccacacctgcggacgaaggatcagggggacagaatccagcgggggtaagctcatggcgacgatctcttatgacgttcacggtaaatatttttggcgatagagatgaccaccgccagggcaaaaagcagcgaaagcccggtggccagccagaaggtgcccccggtgagcagactcccggcccaggaataaacgatagtcgccgggagctggcccacgccggtggccagcataaagggccagaagcgcagcgaggttagtccggcggcatagctgaccgggtcaaacgggacaaacggcagcaggcggcagaccaggatcgtctgcgggccaaagcgggtgaaatagccgtcggcactgcgcagcaccgcgcggccggtgagtttctccaccacttcgcgccccagcgctctggcgatgcagaagcagagcccggccccgaccatagcgctgaaccacgacagcgccccgccccagaaggcgccgaacagggcggcgttcgccagggtaatcaggaaagccggcagcggagcgacgatcgcctggaggatcatcagcgcaaatgagaccagcgcggcctgcggcccccaggcggcgataaaccctctgacctgctgcggatccagggaggctaacgccgtcagactctgctgcagaaaggtacgcccgccagggaaccacagccaggcggccagagcggcggcgaccacgacggcaagggccagccgggcgcggcgcaggtgacggcgatcaggttgggtcatggcgcacctcctcactgcacgccgccacgcgacgggcgcgggcaaaccgtttgcctatctgcaccagggcaaacagcagcccgccggcgaggctcagttttagcgcgaaggcgagggtcaccccctcgcgggccagttcgctggccatcaccgaatagatgaccagacccggcagggtggtcacggccgagatcagggtaaagggccagaagcggatcgccgtcaggccgtaggcgtaattctgaatattgtagggaaagagcggcaccaggcgggtgaggatcaggaaatcgcagccactgcgggcgataccgcgctcaatcgcctgaaagacggtggtatggcccacatagcgctgcagcagatcgcgcccaagccagcgggcgattaaaaacgacagcgaagaggcgagggtggcggcggcaaacgagagcagggagcctgttagcgggccgaagagcatcccgccggcgatcaccagcaggctgccggggatcagacacagggtggcaatgataaacagcgcagcatagaccagatatccccaggcgccctgatggcggagggtgtcctgaagcagatgcagatgagtcagcagatcgtggagaccgacgcggtggctgataacggccagcgtggccaccagcgcgagaagtcccagccctttaccaatggccggatgacggcttcttttgcatgagaggtgctcctgtacagtctggacgcagtggacatcaaaaagtgcgcgcgacagtatcctgttccgacgaccgtcacaatggtttaccgtcgctttgttgattttgctcaggaaattctgccccccgcacagcgggaggcgagagaagggcgtgaattatggccggaaggtggcccacaccggcgcgtggtcggacggtttttccatcccgcggatctcgtaatcgatcccggtttccacgcagcgctgcgccagaggctggctggccagcagcagatcgatgcgcagcccacggttatcgtcgaagcctttggagcggtaatcaaaccacgagaaatgctcatgattgtcggggttagcctgacgccaggtatccaccaggccccagcccagcaggcggtccatccattcccgttcttccggcaggaaggaacatttgccggtgcgcagccagcgtttgcggttctcttcaccgataccgatgtccagatcggtaggactgatgttcatatcgcccatgatcagcaccggattctctttgttgagctcggtctccagatagttctgcagattctgatagaacgccgctttggccgggaatttggtttcatgatcgcggctttcaccctgagggaaatagccgttaatcactgtgacgttgccgaagggcgacgggatctccgccataatgatgcggcgctgagcctcttcgccatcgtccgggaaaccgcggcggacggcaatcggcgtctctttggtcagcagcgcgacgccataatggcctttctgcccgtgataaaagacgttatagccgagcctggcaacctcttcgagagggaacatgtcgtcgtgaactttggtttcctgcaggccaatcacgtccggctggtgtttttcgacgatggcggccagttggtgtgggcgggcacgcaggccgttgatattaaaagagacgaatttcatagtcgctgccactgtgcaaggtgaatagtgcagggatggtagcagaaattcgccaggctggctgccaccggatgcgtcattctgccaatcgctgcgcatgagcgtgccgtgggtgccccttttgcgggcatgccgcgccaaaaaagggcaaatagatacgataaatttcgcagaggatcacaattacagaattatatcttaccgttgcataatttatcttctttaatcactgtttatccccctttgtcggatacttattcactaaatatgcattttatgtgaatggcgttcagctgtaactcattgattctgcgttatctcatccgatttatgcatttttatcgctggctggcacgaaccgtgcaatctacatttacagcgtaataactcatatttattaacattattgctacttttaatttaccggaagaggtcgatatgtctcagtcaattacgcgtaaccactttgatgaatggatgatgccggtctacgcgccagcggcgtttattccggtgcggggcgccgggtcacggctgtgggatcagcagggcaaagagtatatcgattttgccggcggcatcgccgtgaacgcgctggggcatgcccatccgcgtctggtgcaagccctgaccgaccaggccggcaagttctggcataccggcaacggctacaccaatgagccgatcctgcgtctggccaaaatgcttatcgatgctaccttcgccgaccgggtcttcttctgtaactccggcgccgaggccaatgaggcagcgctcaagctggcgcgtaaatatgcccacgatcgctttggcagcgagaaaagtggcatcgtcgcctttcagaacgctttccacgggcggacgctgttcaccgtctcggcgggcggtcagccggcctattcccgggatttcgccccgctgccgccgcagatccagcatgccgtatttaacgatctcgagtcggcaaaggccttaatcaatgaccagacctgcgcggtgatcgtcgagccggtgcagggcgaagggggcgtggtgccggccagcgtcgagtttttacgcggcctgcgtcagctttgcgaccagcacaacgccctgctgattttcgatgaagtgcagaccggggtcgggcgcaccggcgagctgtatgcctatatgcactacggcgtgacgcccgatgtgctgaccaccgccaaagcgctgggcggtggtttccctattggcgcgctgctggcgacagaggcctgcgccagcgtgatgaccgtcggcacccacggcaccacctacggcggtaacccgctggccggggcggtggccggcgaactgctgtcgatcgtcaacaccccggaagtgctctccggcgtcagacagcgccatcagtggttttgtgaacgcctgcaggcaattaacgcccgctatggcctgttcaaggagatccgcggcctgggactgctgctcggctgcgtgctaaacgacgcctgggccgggaaggcgaaaaccctcagtaacctggcggcggaagagggggtgatgattctgatcgccggcgccaacgtggtgcgtttcgcgccggcgctgaacgtcagtgaagaagaggtgaacagcgggctggatcgcgtcgagcgggcctgcgcgcgtttcgtggcaggagtctcatcatgatggttattcgaccggtggagccgggcgatttgcccgggctgctgaagctggcagcggagaccggcggcgggctgacctcgctgccggtggatgaagcgaccctcgcggcacggatcgcccgctcgcagcagacctggcgcggcgagctaccgaaaagcgagcagggctatgtctttgtgctggaggagagcgaaagcggcgcggtggtgggcatctgcgcgatcgaggtggcggtggggctcaacgatccctggtataactaccgggtcggcacccaggtccatgcctcgaaggagctcaacgtctatcaggcgctgccgacgctgtttctcagcaacgatcataccggcagcagcgagctgtgcaccctgttcctcgacccgcagtggcgcaaagagggcaatggctatctgctgtcgaaatcacgcttcttatttatggccgcctttcgcgagcgcttcaatgagaaggtggtcgccgagatgcgcggggtgattgacgagcagggctactcgccgttctgggagagcctgggcaaacgctttttcgccatggagttttcccgtgccgactacctgtgcggcaccggacagaaggctttcattgccgccctgatgcccaagcatccgctgtatatcgatttcctttcccctgaggcacaggcggtgatcggcaaggttcatccgcagaccgccccggcccggacggtgctggagaaagaggggttccgctacctgaactacatcgatattttcgacggcggcccgactctggagtgcgacatcgaccgggtgcgggcgatccgcaaaagccgtctggtgactaccgaggcaggtgaaaccccgcccggtgactggccgctgtgcctggtggcgaatgaacagtatcaccagttccgcgctctgctggtgcatgccgatccggatggcgacaccctgaccctcagcgcccgcgaactggatatgctgaagtgtcatgccggcgaccaggtgcgcatggtgcgcctgatccctgaggagaaaactgcatgagtctgtggattaacggcgagtggcggcccggccgtgggccaggtttcagtaaacaggatccggttaacctgaaggttgtctggcagggcgaggcggcggatgccgggcaggttgccgaggcggtggcggctgcccgccaggcgttcccgtcctgggcgcggctgccgtttgccgcccgtcaggcgatcgttgaaaagtttgccgctctgctggaagccagtaaggcggagctgacggcggttatcggcgccgagaccggaaagccgcgctgggaggcggccggggaagtgacggcgatgatcaacaaggtggcgatctcggtgaaggcctaccacgtccgcaccggcgaacagcacagcgacctgcccgacggcgccgccacgctgcgtcaccggccgcacggcgtactggcggtgtttggcccctataactttcccggccatctgccgaacgggcacatcgtgccggcgctgctggcgggcaataccgtggtttttaaacccagcgaactcaccccgcgcagcggcgaagcggtggtgaaactatggcagcaggccggcctgcccgccggggtgctcaacctggtgcagggcggtcgggaaaccggcgaggcgcttagcggccaggcggatatcgacggactgctgtttaccggcagctcaaccaccggttttcatctgcatcgccagctggccgggcagccgcagaagatcctcgcgctggagatgggcggcaataacccgctgatcgtcgacgatccgagggacgtggatgccgcggtgcatctgaccatccagtccgcctttattaccgccggccagcgctgcacctgcgcccgccgtctgctggtccggcgcggcgaggcgggcgatgccttcctctcccggctggtgacggtgagccagcggctgatcccggcggcgtgggacgccgagccgcagccgtttctcggcgggcttatctctgaacaagccgcgcagaaagtgcatcaggcctggctgcagcgggtcgccgctggcgcggtcaccctgctggagccgcggttattgcaggccgggacgtcgctgctaacgccggggattgtcgacatgagcgacgtggccaatgtcgaggatgaagaggtgtttggcccgctgcttggggtctggcgctacgacacgttcgaggaggcgattgccttagccaacgctacccgcttcggcctctcctgtgggttaatctccccggaacgggagaagttcgatcgactgctgcttgaggcgcgggcagggatagttaactggaacaaaccgctgaccggggcggcgagtaccgcgccgttcggcggcaccggggcgtccggtaaccatcgtccgggggcctggtatgccgccgattattgcgcctggccgatggccagccttgaatcgccgaccctgacgctgcccgccagcctgagcccggggctcgactttctggcgggggaggcgtcatgaccgcccgcgaagtcaactttgacggtctgcccgggctgacccatcactacgccggactctcctttggcaatgaggcttccacccggcatcgctatcgggtgtctaacccgcagctggcggcaaagcaggggctgaaaaaaatgaaagccctcgccgacgctggctacccgcaggcggtgatcccgccgcaggagcgtcccaacgtgccgcttctgcgccagctgggctttagcggcagcgatgagcaggtggtggcccgggtggcgcagcaggagccggatctgctgtcggcggtgagttcggcctcggcgatgtgggtggcgaacgcggcgacggtgtgtccctccgccgattcgctggatggcctggtgcatctgacggtggcgaatctgcaggataaattccaccgcgccagcgaagcaccgactacagaggcgctgctgcaggcgattttccccgaccgcacgcgatttgctatccacccggcgctgcccgcctcggcctggtttggcgacgaaggggcggcgaaccataatcgtctcggcggcgagtatggcgctcccggcgtccagctctttgtctatggccgccgccgggggagcgaggaggcgccgcgtcgctatccggcgcggcaaacccttgaggccagccaggcggtagcgcgcctcaatcaggtcaatccccgccagctgatcttcgcccgccagcatccggcggcgatcgacacgggggtttttcataacgacgtcatcgcggtgagcaaccgtcaggtcctgttctgccatgagcaggcctttgccgaccagaccgcgcttctccagcagctggcgcagcgggtgccgggttttacgccgctggtggttcccgccagccgggtcttggtggcagaggcggttgccacctatctgttcaacagccagctgttgagccgggcggatggcagcatggcgcttatcctgcctcaggaagcgcaggagcatgccggcgtctgggaatacctcaatgagctgctggccggggataaccctatcgccgacctgcgggtgttcgatctgcgcgagagcatggccaacggcggcggtccggcgtgcctgcgcctgcgggtggtgttgacggccgaggagtatcaggcggtcaatccgcacgtcctgatgaacgatacgctgtttgccaccctcaatgactgggtggatcgctactatcgcgatcgtctcacccagaccgacctcgccgacccgcagctgctgcgggaagggcgcgacgcgctggatcggttgacccagatcctgcagctcggttcggtttatccatttcagcaataagggggcgcggtggaacattttctggcattaaccctggcggggcgattgccccatcactttcacggcgagacggctcattcccgctggcactggctcggggaagggatccttgagctgacgccgcatgcgcgctgcgagcgcgggctggtactttcctgcgccattcatggcaacgaaacggcgccggtggagatagtcgaccagctggtgcagcgactggtccgggaggcgctcccgctgcgctggcggctgctggtgatcgtcggcaacccaccagcgctgcgggcgaataagcgctatctgcacagcgatatgaaccgcatgtttggcgagcgctggcggcagtttccgctcagtgaggagacgcagcgggcgcagcggctggagcaggcggtggcccgcttttatcgcgaccacgatggcccgcgctggcacctcgatctgcataccgcgatccgcgggtcgctacatccgcgcttcggcgtgctcccggcccgcgatacgccgtgggaggaggattttcttcactggctgggcggcgccgggctggaggcactggtgtttcatcgccagcccggcgggaccttcacccacttcagctgcgaacggttcgcggcgctggcctgcacccttgagctgggcaaagctctgccgttgggggaaaacgatctgacgcagtttgccgccgtccagcgggcgctctcccggctgctggtgggggatctggccattgccgacgccccagcgccgctgcgctaccgggtggtacagcagctaacccgccatagtgatgatttccgcttgcatatggcggatcagacgctgaacttcacccccttcgaacccggcacgctgctggcggaggagggcgagaggcggtatgtggtggggcctgagacggagtatgttctgtttcctaacccgacggtggcgaaaggactgcgcgccggcctgatgctggagaaattatcctgagggcaagccgtccgccgggcggcctgctttatttcgcgcgtcttttttcgccatcttattttttcgtgccccagtataaatttgcagattattcctggtaaaatgctttgtttttaatctcccctcctttatactctccataatttctctgcaaaacagtaatttatttattttttattgcaattcttcggctaaattccttattttctccataattggcgagaaactgttttttacactttcattgttttactcttgctctgactaattgacgattaacgtcgtaaagttaatctcgtcaacacggcaacgcgccgtaagaataacgtaaagtaaggattgaatgatgaagaaactcactgcactgtttgttgcctctactctggctctgggcgcggctaacctggcacacgccgccgataccaccaccgcgccgagcgacagcaagccgatgatgatgcatcataaaggcggcccgggtcagcatgacatgatgtttaaaggcctgaacctgaccgatgcgcagaagcagcagatccgcgacatcatgaagagccagcgcgaaaatatgaaacgtccgtcccttgaagaacgccgcgcgatgcacgatctgatcgccagcgacaccttcgataaggcgaaggcggaagcgcagatcgataagatggaagcgcagcataaagcgatggcgctgtcccgcctggaaacgcagaacaagatctacaacattctgaccccagagcagaaaaaacagttcaatgctaattttgagaagcatctgacagaacgcaacgcgccggcaggtaaaatgcctgcacctgctgaataatgtagcgcactgaatcaagaccgccggtcttgcccaataatgccatcaggcgttgggcagggccggcggttttttattggtggcttctcagccaagcggatgcagcggatagtctccgctgagcaaaggcttacagaggatcttgtaaccatcctggtcaaatccggcgggcagacgggtcaactccgccgcctggtcgagcgattcaacggcgcccagccacagccagttatgaatgacgtgatactgcgtcatgtccgggccgcgctcctccagcgccacgggccccgcccacggccagcacaccagctgcagtctgctcatctgcgccagcaggcgctctttgtgcgcctccacgctctcctttccacagcaggccccggcgcagcggcccagcgcggagcgaaagcaggcgcggccgcggctgagcggttccagaccaagcaggccataacagaggcgctgttcgtcagcgaggctctgcagcatctgcagcgccgcccgccggttggcgaacaggccatagagatgctgctggtgcgagaaatcaacctcacgggcatagacaatctgcggccggtcgtccgcaagtagccaggcgcagagctgcttgttacgccgtagccgcttgttaaacagcggctgctgctctttaatcaaccgcgcctccagcagcagcgctcccagctcgccagcggtgcgctgccaggtgatacgccgcgactgacgcagcatcgcggcctcttcaggggtgcgcaggtgggataacacccggctgcggaggttgacgctcttaccgatatagagcggcatcgtgtcgctgtcgccgtgaaactgatagacgcccggcagcttcggcagcgcctccagccacgggcgaagatgttcgggatattcatagatcgccgccgcctcaaactcgagacgcggggctgattgctttctggccacaataactcctggtactgtctatccatccagtatagcaggccatttttgcggcgaaaaggacaaaaaataaccccggcgcaggccggggcggggggagagactattttttccagaaatcgtcaaagacggtgatcggcggccgacgcttgtgttcggttttcagataccagccctcgatcgttttggcgatgctcgggtccagcgttttgccttccagataatcgtcgatgttctcgtaggtgacacccagggccacttcatccggcagggaggggcgatcgtcttccaggtcggcggtgggcagcttcttatacagatgttccgggcagccgagatgggccagcagctgtttgccctgacgtttgttcaggcggaaaattgggttgatgtcggtgccgccgtcgccatatttggtgaaaaagccggtaatcgcttccgccgcatggtcggtaccgaccacaactcctttggtcattccggcgatgctgtactgggccttcattcgctcacgggctttttcatttccgcgaacgaagtcgctcagttcgatgcctgcttcgcgcagcgcctgttcgctggccagcaccgcagctttaatattgactgtcaacacccggtcaggctggataaatgcgatggcgtcctggcagtcctgctcatcagcctgcacgccatagggtaaacggacggcgataaactgcaggctactgtcgccggtttcggcacgcagttcgtttatcgctatctggcacagttttcccgtcagggtggagtcctgaccgccgctgatacccagcaccagcgatttaataaacgggtaggtctgcaggtatgacttcaggaaatcgacgctgcggcggatctcgcctgcgacatcaatctgcggctttgcgcccagcgcctgaataatctcttgttgtagcgtcatcgcgccctccgaaagtgaatctgtttggcaagctgttggcttaaagctacctctttgccgctgaaacgacaaggaccgtggttttgactgccggaaaagaaggcaatcaatgacataggttttcattatagatgctgtaccgcgcattgcgccgccgtccgacgtcggcagatcaatcctgtttacgcaataacataacctgacatgatttcgctgttcggcttgaaaaataacactatttattccaggcttatcgttacacagtagaaaagaggaaccaaaatgaacaaaagcttagcaggaatactgggcgtcaccgtcgcgttaaccttactggcgggctgtaccgcttacgatcgtaccaaagaccagtttacccagccggtggtgaaagatgtgaagaaagggatgtcgcgtcagcaggtgatgcagatcgccggcaaaccttcaacggaagtcaccatggtccatgcccgcggcacctgccagacctatatcctcggtcaacgagatggtaaagttgaaacctactttgtggccctcgacgaaacgggtcacgtcatgaactccggctaccagacctgcgccgagtatgataccgacccgcgcaacgccaggtaagcttcctactgtttactgacttctacgtaagcccgaccactggtcgggcttttttgtgagtaatgatgcttatttaattgcgcgaattatttggatgaaaatgtgagggtagtcaaaaccggaggtcaatgagagacaattctgttcaacagcgaattatcctggcggctcagcttgccgtatactcaactcataaacagaattaaccggatgttaccagtcttaccggctctcagcggttactgaaggccctggtctcacacattgaggaagcgttcatggaaaagaaacacatttatctcttctgctcggcaggcatgtccacgtcactgctggtctccaaaatgcgggcgcaggcggaaaaatatgaagtcccggtcattattgaagcctatcccgaaaccctcgcgggcgaaaaagggccggaagccgacgtagtattattagggccacaaattgcgtatatgttaccggaaattcagcgcctgctgccgaataaaccggttgaagttatcgactcccttctctatggcaaagttgatggtttaggggtattgaaagccgccgtcgcggctattaagaaagctgcagcacaataattttaacttttaaaactcgatgtattttgacgcctggcggctgactgttgccggacgtcaaaaaataatgagtttattttcccgtcaaagagtaatttcatacatcatcgccgtaatagtttattgcggcttttaagggtattgactatgagtaaagtgatcgattcgcttgaaaaggtactccttccttttgcagtgaaaataggaaagcagccgcatattaatgcaataaaaaatggatttattaaattaatgccgttgaccctcgccggggccatgtttgtgttaattaacaacgtttttctgagcttcggcgaaggctctttcttttattccatgggcattcgcctggatgcctccaccattgaaaccttaaacggctttaaggctatcggcggaaacgtctataacggcaccctcgggattatgtcgctaatggcgccgttctttatcggctccgcgctggcggaagagcgcaaagttgacccgatggcagctggcctgctggcggtggcggccttcatgaccgtgaccccgtatagcgtgggcgaagcctatgcggtgggcgccaactggttgggcgggcagaacatcatctccgggatgattatcggtctggtcgttgcggaactgttcaccttcgtgatccgtcgcaactgggtgattagactgccggacagcgtgccggggtcggtatcacgctctttctcagcgctgatcccgggcttcttgatcctctccatcttcggcattatctcgtgggccctggcgagctatggcagcaacttccaccagatcatcatggactctatctcgacgccgctggcggcgatgggcagcgtggttggctgggcatacgttatttttaactctctgctgtggttcttcggtgtgcacggttctctggcgcttaccgccctggataacggcatcatgacgccgtgggcgctggaaaacatcgcgctgtacaaccagtacggctctgttgatgcggccatcgaagcgggcaaacagttccacttctgggctaagccgatgctcgactcctacatcctgctgggtggctccggggcgacgctgggtctgattatcgccatctttatcgcttctcgccgcgctgaccatcgtcaggttgctaagctggcgctgccgtcaggcatcttccagattaacgaaccgattctgtttggtctgccgatcatcatgaacccggtgatgttcatcccgttcgtgctggttcagccgattctggcggccattacgctggcggcctacagcctggggattatcccaccggtgaccaacctggcgccgtggactatgccgaccggtttgggagcgttctttaacagtaacggcagcgttgccgccctgctggtggccctgttcaaccttggcgtcgctaccctggtctacctgccgtttgtggtgctgtcgaataaagcgcagaccgttatcgagcaggaagagagcgaagaagacatcgctaacgcactgaaattctgataccgcgcggtacgggcagcgtcccgtaccgcctgataaatgagggaaatattatgtttgatctggacaacatcaacgcggtagagaccccggaaaatgacctcgaagaggtagtgatggggctgattatcaactccggacaagcccgcagcctggcctatgccgcgctgaagcaggcgaagcagggcgactttgccgcagcgaaagcgatgatggagcagtcgcgccaggcgctgagcgaggcgcatcgcgtgcagacccagcttatcgaaagcgacgagggcgaagggaaaatgaaggtcagcctggtgctggtgcatgcccaggaccatctgatgacctccatgctggctcgtgagctggtggccgaattgattgagctgcacgagaaggtacaataggccatcgcgacgatgaggcagcccagaatgatgaccaccgagatcagtaccgccagagaacaacagctgttcaacgggaagaactttcatgtggtcatctataacaaaacggaaagcgtgagcgggcttcaccagcatgattactacgaatttaccgtggtgttaaccgggcgctattaccaggagatcaatggcaaacgggtgctgctggagcgcggggatttcgtctttatcccgatgggctcgcaccaccagagcttttacgagttcggggcgacgcgcatccttaacgtcggcatcagcagacgcttctttgagaaacactacctgccgctgctgccgtttggtctggtggcttcgcaagtctacgccgtgcagagcgcttttctcggctacgttgagtcggtcatcgcctcactcaattttcgcgaaacggaatttgacgaatttatcgagctggtctccttttatgtcattaaccgtttacgccactatcgtgaagagccggttgccgacgtgacgccgcaatggttaaaaaataccgtggaagccatgcatgataagctgaaattcggtgaaggcgctcttgaaaatatggttcgcttatccggaaaaacgcaggaatatttaacccgggcgacccagcgctattatggtaaaacgccgatgcagataattaatgatatccgtatcaactttgccaaaaaacagctggaaattaccaattattcggtgacggatattgcgtatgaatcaggttacagcagcccgagcttgtttattaaaacctttaaaaaactgacgtcgtttacgccgagcagttatcgcaaacatttgaccagtattaattaaacccgcgcggcgttcgccgccaggtttataccgaaaatcattcaagttaactgtccgcattgttgcggagagcggcctgcgtccaggcgcagcgcctaagggagaaaaagatgagccagaaattaaaagtagtcactattggcggcggcagcagctataccccggaattactggaaggatttctgaaacgttatcatgaactgccggtaagcgaactgtggttggtagacgtcgaagagggacaggagaagctcgatattatccacgcgctgtgccagcggatggtggaaaaagccggcgtgccgatgaaagtctataaaacgctggatcgccgcgcagcgctgcagggcgcagatttcgtcaccacccagctgcgcgtgggccagctgaaggcgcgtgaaaaagatgagcgcatcccgctgagtcacggctacctgggccaggagaccaacggggcgggcgggttgtttaaaggactgcgcaccatcccggtgattttcgacatcgtgaaagatgtgcaggaaatttgccccgacgcatggatcatcaactttaccaacccggcgggcatggtcaccgaggcggtctatcgccacaccaatttcaaacgctttatcggggtgtgcaacattcctatcggcatgaagatgttcatcaccgacgtgctgcagctgagcccgagcgatgagctgaatatcgacctgtttggtctgaaccacctggtgttcgtccgcgacgtgctggttaacggcgtctcgcgcttcgatgaactgctggacggcgtggcctccggccgtctgaccgcgaactcggtgaaaaacatcttcgacctgccgtttagcgaagggctgatccgctccctgcgcctgatcccatgctcttacctgctctactactttaagccaaaagagatgctggcgattgagatgggcgagtactacaaaggcggtgcgcgcgcccaggtggtgcagaaggtggagaaacagctgttcgagctgtataaaaacccggatcttaacgttaagccgaaggagctggagcagcgcggcggggcctattactctgatgccgcttgcgaagtaatcaatgccatctataacgacaagcagactgagcactatgtgaatatcccgcatcatggtcatgtcgataatatcccggcggactgggcggtagagatgagctgcaccttaggccgcgacggcgcgaagccgacgccgcgcattactcatttcgatgagaaggtgttagggcttatctacaccatcaaggggttcgaagtggcggccagccaggcggcgatcagcggtgagctgaacgatgtcctgttggcgctgaacttaagcccgctgatccattccgatcgtgacgccgaacagctggcgcgggagatgattctggcgcatgaaaaatggctgccgaactttgcggcgacgatcgaaaaactaaaatcgtaacgggagtagcaaatggaacgcgtattgatcgtcaatgccgacgacttcggcctcagtaaagggcagaactacggcattatcgaggcctgtcgcaacggcgtggtgacatcgaccaccgcgctggtcaacggcgcagccattgaccacgccgcccagctgagccgcagtactccggagctggcggtcggtatgcactttgtactgacgctgggcgagccgctgtcggccatgccgggattaacccgcgatggccggctgggcaaatggatctggcagcaggcggaagaagatatcctgccgctggaagagatcgcccacgagctggcgtgtcagtaccgtcgttttgtcgaactcttcggccacgagccgacgcatatcgacagccatcaccatgtgcatatgttcgcccagatttatcccatcgtcgcggcctttgcccgcgagaagggcattgcgttacgcattgaccgccaggtggcggcgcagagtgggctcgaccagcaggcggcgcgcagcagcgccggcttcagcagcgagttttacggcgaagcggtctctgaggaactgtttctgcagacgctggatgcctccatcgcccgcggggagcgctccctggaggtgatgtgtcatccggcttatgtcgatcggatcattatgggcagcgcctactgctatccgcgactggatgagcttgatgtgctgacatctgcctcgctgaaagcggcggtggccgaccggggttatcgtctgggaacctaccgcgacgtgtaagcccgacgggggaaagggaaagtgaatcaagcccggcacagcgtgccgggctttttactacgccggaatagcggcgattttcgggcttctcgaccacacgcggtgggccgtcatcagggcgagcagtttgtccgccgctggcgtgtcgagcgcatcggtgacgatgaccccctcttcaccctgggtcggaacatgcagaacggacgtcagctgccgcgcatcccctgccagcaggatcggcttcagatgtttataggcttccagcaggtaatagcgcgcgtcaccgctctgactcagggcgctgaggtcgccgccgggcaccaccaccgcatccaccgtcagcgacggggaaccggcgaaggtgccggcgatcggcagcggagaaccatcgtcggcaatgacttcgcccattcgcgagtagagcagcttgctgtgcacgccctgggcctgcagcgcctgcaggagctgaaccagatcctgcgctgaggtgcgttcgttgagcaggactgccaccacgcgacctttcacatctccttcggcgtcggcgtagaggctgaggctgggatctttctccacgccattgaccggggcgggcagggtaatgttgcgctgatcgtcgctcagttcgatgcctaagttcgccccaaccgcttccgcaagcttagtatcaatgtgggccagatgatcgaccacccgctcgcggatccaggtgcggaccactttgctgagttcgaagctgaaaccatcgataatatgctgctgttcaatcggcgtctggctcagccagaacagacgcggctgggcgtaatattcgccgaacgaagggctgcgctggcggattttttcgccgtcgacgcgctcggcgagggactcaaagccaccgcgtttggcggcaggcggcgtctcgcgcggccagttgtcgttaatcgagttgggctcgtagttggccggattggtgtcaatgtccatccggtgcatcccgtcacgctggaaattatgatacgggcaggtcggacggttgatggggatttcatggaagttcggcccacccaggcggctaatttgcgtatcggtgtaagagaagagacgcccctgcagcagcggatcgttgctgaaatcaatgcccgggacgatatgtccgggatggaaggccgcctgttcattttcggcaaagaagttatccgggttgcggttgaggaccattctgccaacccgctgcaccggcaccagcgcctcggggatcagcttggtgggatcgagcaggtcgaagtcaaaagcaaattcattctcttcggggatcaattgcaggccaagctcaaattccgggtagtccccggcttcgatggcctcccatagatcgcggcgatgaaaatcggggtcgcggccggtcagcttctgcgcttcatcccacaccagcgacgccttgccggcgaccggtttccagtgaaaacgaacgaaggtggctttgccctcggcattaatcagacggaaggtgtggatcccgaagccttccatggtgcgatagctgcgcgggatgccgcgatccgacatcgcccacatcacgttgtgcagcgtttccggctgcagggaaacatagtcccagaaagtatcgtgggcgctctgcccttgtgggatggcccagtggggttcaggcttcacggcgtggacaaagtcggggaacttcatcgcgtcctggatgaagaagaccggtgtgttgttgcccaccaggtcaaaaatcccttcgtcagtgtaaaacttggtagcgaagccgcgaatatcgcggacggtgtccgccgaccccgcgccgccctgcacggtggaaaagcgtacaaacaccggggtgattttatcggctgacgaaagaaaatcggctttagtcaacgcagccaggcttttgtagggctggaagtagccgtgggcggcagagccgcgggcatgaacgatacgctccggaatacgctcgtggtcaaagtgggtgatcttctcccgcaggataaaatcttccagcagcgttgggccgcggctaccggcgcgcagcgaattctgatcgtcagcaatgcgcacgccctggttggtggtcagcggaaaatcttccccccctttgcgttgcgcctccagggaatccagtttgctgttatgagtatcgggcgctttcaggctgcctggggcggtgggttcgacgcccggagcggtaggtttcggcgtggggcgccactcccgatcgtccggcgccagcgaatcgagacccggctgcgcttcctcgctgtcgtggaccggtgcctgctgttggtgagggttcgggtgcttatcagacattactcgtctcctgctttcattgctaaaagtggtcgttgatagaccaaaacccttctaactatagaacattacgctgtctgcgcccggcgagggggcagggagttatcctaaaatgcgcatcggcggcgaaggggcgacgaacggggccacaatcggctatgatagaggtttctgtttcccgctatgtttagtgaatccatttgttatgaaaccattgcgccaacaaaatcgccctgtcattagctacgtgccgcgcgtggagcctgcgcccccggaacatgccgtgaaaatggaccattttcgcgatgtctggattttgcgcgggaagtatgtcgcttttctgctgatgggggagcatttccgtcgctcaccggcattcagcgtgccggagtcggcgcagcgctgggctaaccaggtgcgtcaggaaggtgagattgaagcctgagtcggctgcagaaataaaaaaaccgctgaatgatcagcggttttttttgtgcttgccgtttagcgatgcgccagttcggcttcttcctcgctatcgaagatcgacttgtcggtctggcgcagccactggctggtcagcgtcccggcggtcattgagccgttaacgttcagcgcggtacgccccatatcgatcagcggttcgacggagatgagcagggctaccagggtcaccggcaggcccatcgccggcaggacgatcagcgcggcgaaggtcgcgccgccgcccaccccggcgacgcccgccgagctgacggtgacgatgcccacgagggtggcaatccacatcggatccagcgggttgatgcccacggtcggcgcgaccatcaccgccaacattgccggatagataccggcgcagccgttctggccgatggtggcaccaaaggaggcggagaagctggcaatcgactccggtacgccgagacgacgggtttgcgcctcaacgttcagcggaatggaggcggcgctggagcggctggtaaaggcgaaggtgatcaccggccagactttacggaagtacttcagcgggctgacgccgttaatcgccagcagcaggccgtggacgacaaacataatacccagcgcaatgtacgaggctaccacgaagccgccaagcttgatgatgtcctgcaaattcgacccggcaaccactttggtcatcagggccagcacaccgtaaggggtcagctgcatgaccagacgaaccagcttcattacccagccctgcagggtatcgatcgcggtcagcacgcgctggcctttttccacatcctctttcagcaacttaagcgctgcgacgccgaggaacgccgagaaaatgacgatgctgatgatggaggttgggttagccccggtcaggtcagcaaacgggttcttcggcacgaaggaaaggatcagctgcgggacgctgagatccgctactttccccacatagttgctctggatggcgttcaaacgggcggtctccgcgctgccctggaccagaccctcggcggtgaggccgaacatattggtcaccagcacgccaaccagggcggcgatcagggtggtgaacaacagagtaccgatgctcaggaagctaattttccccagctgcgaggcattgtgcaggcgggccaccgcgctaaggatggaggcgaagaccagcggcataacaatcatttgcagcagctggacgtaaccgttgccgacgatattgaaccactggatggaatccttcagcacctggctgtcagacccgtagattagctgcagcgccagaccaaagaccacgccagtcgccagaccgaccagcacttttctggccaggctccactgtttatgacgtgtttgccccagcgcaaacagtaatacggcgaacacgactacgttcgctattaatggaaagttcatccccgttctcctgatatttttataacctgggctggtggataaccagctcttatgacggcaaggttagcagaaggcgttatcaaggacttatattcaaatggaatgggttataaccaaatggcgttttccgccgctttatcgcccactctggtgacttataaagcgattgaaggtgatctgcagggaattgatcaccccggatgaccagcgtatcgcgctgttgtccgccagcgtctgcggcatccagacggcatagacgaacagcgccatacacaaggcgcgttcgagctgattgcccttgcgcggcgcaaggatcggcagccggaagcgccagcgacagggccacagcagcggcacaccggcgggggtgagcatatcggcgagaatgtggctgagatagcccagcaccaggccctggagagcgtctgccgggacaatccagctgtcaggcactttcagatagaacagcgtcagcgcgccaaagacggccagcaggctgtgggtgaagccgcggtggccaaaggcccgcgccacgggctttgagatccagctcagccgttggccaagaaacgactttgggtgatcgatgtccggcagcaggcaggtcaataccgccgagggcacaatatgccaccagtcgccctgcgccagcaccggcgttaactctgcgtttttggcaaatactgcgcaggcgattgaaaagaagagatggccttccgccgtcatgataacacaccctaaactgtcgattcatacagtatagggtttttatacagtgtacggaagaggtgacggtgtaactctttgtcacaaactctcagcgcgccagccatccgccatcgacggccagcgtatagccgttaatatagtcggccgctgatgaggcgagaaacaccaccggcccctgcaggtctttcggcactccccagcgaccagcgggaatgcgctcgaggatcgcctggttacgctcttcatcttcgcgcagcgcctgggtgttgttggtggccatatacccgggcgctatggcgttgacgttgataccctggccagcccattcgttggccagcagacgggtcaaacccagcacgccgcttttcgaggcggtgtaggaggggacgcggatcccgccctgaaacgacagcatcgaggcgatgttaatgattttcccgccttccccctggcgaatgaactgcctggcgaccgcctggctgagaaagaaaaccgctttgagattcaggtcgatcaccgcgtcccagtcgctttccgtgaaggtcagggcatcatggcggcgtataattccggcgttgttgaccagaatatcgacccggcccatcgctgccaccgcctggtcgaccagaccgctcatatcattctcttggctgagatccgcctgaatggcgtgaaagcggcggcccagcgccagcacctgggcggccgtatcatggggaattttacggttgatgccgacgatatcgcacccggcctgcgccaggcccagcgtcattccctgtcccaggccggtatcgcaaccggtcacgatggcgaccttacccgtcaggtcgaaggcgttcagtaccatattcacctctgtcagctgatctactggcgtacgatgacgccacctgtgaccagcatagagggaggaaaacaaaattacaattaaaatgaaacaatgttttgattttgttgctggcggcgtgacagcgattgttgcacccgccagcggtcttagccgagcaagttctcagcagtgagtgccagcagtgacggaagcttgacgtccgccagcgcaaagcgcgggtcgcggctgttctccgcttccggcaccacgatagaccgcatgcgcgcggctttgctggcgatcatgccgttgaccgaatcctccagcgcgacgcagcgctgcgggtcgactcccagggcagcggcgcagttgaggtagacctgcgggtgcggtttgctccagggtaaatgctccgcggaggcgagagcatcaaactggtcgcgcagttcaaacatatcgagcactttctccagcatcatcagcggcgaggccgaggccaggcccacctttaagccctgagctttacacagggccactgcctcgcgtacgcccggcagcagcgggcgtgaggcttccaccagctcaatggcgcgacgaataatgcgcgcggtagcttccgcccggtctacgccgtgccacggctgctgcgcgtaccacagatccaccaccaggtcgattcgcagaccgagcaggtcgggcagttcatcgcggcgacgggtatccactcccaggctctccatgacctcgacctccgcctgatcccagagcggctccgagtcaatcagcaacccgtccatatcaaatatcgcggcctcaatgcggcgcttcgctgacatatgtccttctcctgttgcgtaatcagataaacgaatcggcaatcatggtatatcataccgcgcattattgggcgaaattcgccgtggcagatagacttatacccgacatactcgggggagcgagggaagccagcgccacgcaacaggcagcaggcgaaccaccaacgcgtctttaacaaggggaactcatgacgtaccaacaagctggacgcatagcggttatcaaacgcattttaggatgggttatctttattcccgccgtgctgtcgacgctgatttctgtgctcaaatttatgtatgagcacagtgaaaagaaacccggcattgatgcggtaatgatggattttgcgcacgtgatgattgagatgatgcgctttaacacgccgttcctgaactttttctggtacaactcgccgctgccggattttcaccatagcctgaacatcggcttctggatcatcttcattctggtgttcgtcggcatggccctgcaggcttccggcgcgcgaatggcgcggcaggcgaaatttctccgcgaggggattgaggatcagctgatcctcgaacaggccaaaggcgcagatgggttaacccgcgagcagctcgctgaacgcattgtggtaccgcgccatacgatcctggtgcagtatttcccactgtacgtgctgccggtgatcgtgattgtcatcggttacttcttcttttcgctgctgggctttctgtaagtcaggtgcccggcaagccgggcaccttcttattccgctggcagaggacgtggttttccctgattatcaacggcaacgtagataaacagcgcttccgtcgccttgtagcgctggccaatcggttctgaagaaacttttttcacccacacttcgatattgattgtcaccgaggtgttgccgcgcttcacgcagcgggcgtagcagcacaccacgtcgccaacggcgaccgggcgtaaaaaggtcatcccatccacccgcacggtcaccacgcgaccctgggcgatctctttggccataatggcgccgccaatatccatctgcgacatcagccagccgccaaaaatatccccgttggcattggtatccgccggcattgccagggtgcgtaaaaccatttcgccctttggggcgagatctgttgttgtcatgctctactctgttgtggtcaaagacgatcagcgggatgctactatgaaaatagcgcagtgagaataggggaatacgcccgctggcgcgggcgcggtggttcagaaggagagggtaacgccggcgtaatacgcgcggccaggctcattgtaggtcgaggcgccggcattttcgcgatacagttgtttatcaaatagattacttattccggcattcaggcgaatatcccggtttagctgatactgagtaccaatacccacgatggaataggcgccaacctcggtggtggcaagggtcccggtttcgttgcggatctccgcatactgacgcggcttctgacggccataaagcgtccagttcacattcgcagacagggcgtcgtttacctgccagtcgagcatcgtgttaacggtatatttcgggataaccgacagcgggttgccagtctctttactttcagatttgagcatccaggtggcattggtccgccagctgaggacatctctcagcaccgggatcagcagatttccttccagcccctcgaccacggctttgccgccgttctgccattgcaaaatattattgccgctggaggtatagcccagtacctctgttccggagacgattttgtttttgtaatcgttgcgaaaccaggtgactccggcagcgtaaccattaaggttaaattcgataccgatctctttgttgatactgatctccgggtcgaggtcagggttacccagcaggtagcagctgccttcagcgatcgtgtttggacaaccgttgccgcgggtggagagcaaatagcctttactggattgatagaggtttggcgctttaaacacgcgcgcgataccggccttcagcgtgaacatatcgccgagctcctgagacagattgaggctggggctccagttactgccaaactgattatgataatcgaagcgaatgccggggatcaggttggtgccgggcacggcttcgatattatcttccagatagataccggtgagggtggcgctgtttttggtactgcgttgcgtagggtcgcccgaggtcccagggatagtctcgccgttgctgttagtggcctgcattgatgccgggtcgtcaagctgatcatggttccattccattcccagcgtcagcgtctggtccgccagccagaagaaaggcacatttaattccgaggtagtacgccaggattccagacggctggtggcataatcttcactgttgatcatgccttcgacgcggccggtagagccttcctgcaggcgggtattgttggttttctcgtagtaaacaccggctttggactggccccaatcccatagaccgttgtaggtgagtccccaggactggcgatagaggcgattagtttcgtggccgtacagggagtccaccagcccgctcgggctaagattgccgttgctgtactgggtatcaccagcatagatattcccctgacggctataggcgtagctgaaatcgaggatctgttgcggggtcattttccatgacagcaaggtgttaatatctttattgcggaccccttcgcgtcccgcagcgtaagagccgttttgcgcatggttaatatcccaggcgtcgggttccgttttattgatattgccatacaggcgcatcgtcagcgcctcgccggccagtgggccgctgagattgaagttagcgcgattggtcgtgccttctttgttgttttccggctggttggtgaagaaagacagcgaaccgtgccaggtgttggtcggacgtttggtaatgatattgaccactccgcccgccgcgccggaaccatagcgcgcggctgccggaccgcggagaacttcaatccgttcgaccatttcggcaggtacccagttgctgtcgccccgggtatcgcgttcgccgcgccagctatagcgaaccgcgttacgtgacgtgaccggtaccccatctatcaggatcagggtgttctccggccccatgccgcggatatcaatctggcggttgttgccccgactgccgctggcgctgttgccggtcaagttcaccccgggcattttacggatgatgtctgagagatcgttgaccggcgactgcttagcaatatcctcagccgtgataatcgacaccccgggctgttgcttaagcgcctcttccgccgtactgcgcacaatcatcgtttcggtatcttgttctgattcttcagcaaaggcgttaggggcgaggagactggatatgaccagcgccagggtcgtgggcacagaatattgcggcgatctcatgtaaatatccttttcaaaacaatgcaaaatgagatcgagaatattaatgataacaattatcattacaatgtaacgagatgaatctccataaaatcctcacaattaccgcaactttttatgcagttgagagaaatcgtgaagagagcctgcacagtgtggccgggaagctgtcagcgtatgcgctgaggttgtgtggttgcagggaatgtttgccagtgcagtaagcttatagggggcgagcgcggcgcgcgatggcgcgccggcggaggggttagtggtagtcgtcctgcggcatatgacggtagatgtagatcccgctcagcaaggtaaagaccagcgtgagggcggttaaaccaaagaccttaaagttaacccagatattctgcggcagccagaaggcgatatagatattggccagcccgcagagaataaagaacaccgcccaggccaggttaagtcgcgaccagacctgctgcggcaggctcagctctttacccagcatgcgctggatcagcggctttttcatcacccactggctgaacagcagcgcgccggcgaacagggcatagatcaccgtcaccttccatttaataaactcatcattatggaagaagatggttaacccgccgaagacggccaccagcacgaaggtgatcagcgccattttttccactttccggtagcgcacccagctgtagatcagcacgacggcggtcgccacaatcagcgccgtggtggcggcgtagatatcgtaaagcttataaaaggcaaagaagaccaccagcggtaaaaaatccagaaactgcttcatacatcgatcccgtctttcaggacggaccggggaaggccccggtcctggttaaaattagctgcggataagcatatacacgcgaaataaatagatcagcaacagggcggaaatcaggttgctgatggtattaatcaccaccgcgccgacgtttggcgtcagggcggcaaagctggaagcaaacagtaacagcagggttttcgccaccagccaaccgataatagccggcgccaccagccgcagattggcccacgccaggcgcatgctgctgcgcatggcgccgaggatgcccattttgtcctgtaccagcatgatcggcgcaaaggccagcacgatggccagcagcacgccgggcaccagcaccagcatcatccccatctgcaccaggaaggtggtgaacaggatcagcagcagcagcttgggcagcaccggcgccgaggcgccgatggcgcgtagggcgctaacgcgatgaccggcggagaccagctggatcagcagcaggacgccgccgacgaggatcgcattacctaccagacccgagaaggttgatgccgccgaggcgcgcagcagaacctgctgctgctccggcgtcatgttctgcaccagctcgaacagcccggcgctaccggcgaggttatcgccttcgctgagtatcgacagctgctcgtcgctgggtgaaaaggcatggccaagtactaccgtaataaacgcgcacaacagcgcaatcagtaaaatagtaatgaactgattacgaaaaaaattcccggtgtcacggtagacggacttcgccgtgatagacatgcattctccttgagtgtcgcaggtgttaactagccggcgattgtaccgcaaatcgttccgtcgtagcactctctgcgccggtcagggcaggtatatctttgtaaagaggccgcaatggtggcaggccgtagcgcgcccgcgcccggttgcaggcatcgttttcctcgccattttccccggacatggcgaattcgcgacacggcgaaggccggttttcataaatagtgcagtgaacggcgtcgccgatatcgccagacagggccgcgcagcggctctggcgctgattggtgccgctcatgcagcgcaggaaaggggtcagcggttcggtcagcgcggagggcaccaggccgcctgcatcgtcggcttccgcccagtagaaagagactcgaaaatacgcacaacaggcaccgcacgtcatgcacgggttgatttcactcataattacacctgaaaaaaacgcatcaacacagattgtcggcagttaacttatccagccgcctcagcgacggcaagaggggcagaaataaatttttgcgcgaaaagtgaaaattgatgtgcgaacaattcaaggcattgcgatcggtagcaaaaattaatctggatcaataaatgttaaatctgaggacttagtgtgatctaaaacagatcaaacgtaactcgttataggtatatttggccgcgctgaaaaaccataatgaggaagtggatatgaagaagttagcagcggcggcattgattcttggcacgctttctaccggcagcgtctgggcgcatgaggcgggggagtttttcattcgtgccgggaccgccaccgtccgaccgacggagggctctgacaatgtgttaggcagccttggcagtttcaacgtcagtaacaatacccagctgggtttaacctttacctatatggcgaccgataacattggcgtggagttgcttgccgcgacgccgttccgccataaggtcggcaccgggccaaccgggactatcgccaccgtccatcagctgccgcccaccctgatggcgcagtggtactttggcgatgcgcaaagcaaggtgcgcccgtacgtgggggccggtatcaactacaccaccttctttaatgaagactttaacgacaccggcaaggcggccgggctttccgatctgagcctgaaggactcctggggcgcggcggggcaggtcggcctcgattatctgattaaccgcgactggctgctgaatatgtcggtgtggtacatggatatcgataccgatgtgaaattcaaagccggcggtgtggaccagaaagtcagcacccgtctggatccgtgggtgtttatgttctccgcaggctatcggttctaaattcttctgtaaactggccaacggatggccagttcattgtctcgtcacacctgtctgccgcaagcctctgtcatcaacagcggatcacacttccgtccactggcgcagcaggttgtgatacatgttgagcagggagaggacctcttctccgtcgccaaagcgggccttcagagactggatggtgcggtccaggtcgtaaagcatcgcacgctgcttatcgtcgcggaccatcgactggatccacaggaaagaggcctggcggacgccgcgggtgaccggggtgacgcagtgcaggctgctggcgggatagagcaccagatgcccggccgggagcttcacccgatgttggccataggtgtcttcaatcaccagttcgccaccctcatagctctccggatcgcaaaggaacagcgtcgctgacagatcagtgcgcatccagccagcctcgccgttctggcgaacggcgccatcgacgtgaaaaccataggtctcccctggcccatagcggttaaacaacggcgcggaaatcgtccgcggcagcgcggcggaaaaaaactgcggatggccgcgcagcatatcgagcacagtggcctgcaggcgggcatacagcggcgttcgggtatcgatctgctggttctgtttgacggccgccccctggctacccaccgtaacccgcccgtcgacccactcggcctgcgccagctgccgggtaaattccgccacctggtctgtcgatagcacgtcaggaatgtgatacatcatcgcggtgttctctctaaaaggtggggcgcaacggccccacgcgcagactcagaaatggacgttcgccgtcagcataaaggtccggggttcgcccggatgatagcgatagccgctcttgttgatggaggccacgtaatcggtatcaaacaggttatacatattgagctgcagatcgaggtttctgttgacccgatagcccagtttggcgtcggcaacccagtagccctcggtgtgatccggggtaccgaccgcaccatcgctgccccggcgcaggcttccgacatagcgcacaccgccgccgacggacagatcgctggtggcctgatactgcgtccacagcgtaaaggcatgtttcggggtgtaggccagggcggaagatccatcctgtgcaacgttctgtccctccgtcactgtcgcatgctgctgagtgtagccggcgataatcgtccagtccggggtcaggtttccggtcgcggagagttcatacccctccacgcgctttttgccgtactgcgaccaggttccgtcatcgttggcggccacttcgttttcaatatcggtgcggaataatgccgcgctgagcagcagacggttgtcgaagatttgccacttggtgcccagctcgctggattttgccttctgcggcttaaagtcggttcggttagcgctgttgccgctgccgctggcggccagggcgaagctgctgcctcccggcggctgctgtgagatggcgtagttgacgtagacattgccctgctcggttaagcggtacagcgccccggctttccagttaaccagattgccggatttagcggtatcgacagtggtgaccgggctgccggtcgactgtccgggcgggcaggcgatagccccgcgtccgctgccgccgcaggcggtggcgctgtcatatttggtatggtaattgtcgagacgcagcccgccgttgatctcaatccgctcggtcagcgtcagcgtatcaaaggcataaatcccgaaggtatcggtctggccgttggcgttcgccccgtttctgtccagcccgccaatcgacaggttgctcaccggatggtagagattcaccgccggcgcggtcctggcgttaacgccatagttggtctggttttcccgggtaaactccacgccggcgctgacgtcatggcctatcgagccagtatcgaaggtcgaggtgatattggtctggttggtcagaatgcggttgctgacatctttggtattaaccagacgcgaccagctccaggtgttgacgtcattgatatcgggggcggtgatattgttcgcgccgcccatcaccgcggtcaaaagatactcctgtttcactcgcgaccagcgggtggtattgcgcacggtggtattctccgtcagatcgtgttcgaagcgcagggtaccgctgtcggtagtagatttatcgtaatcggagtcggtgccatagaaattgctggtatcgaccttcccggtggagttgagtgcggcatacttcggcgaaggcgccgaatagcccggcaggccgacggtagggatcccgccatccggggtgttgttctgccggacgtgcagatagttcagatacagacgagttggggtatcaaggccgaaggctagcgacggtgcgatgccatagcgttcgttttcaatgcggtcccgaccagcgtcatgggttttttcccccatcaggttcagacggaacgcagcgttgtcgctaaacgcctggttcaggtcgagagtgccccggcgcgaccaggcgctgccgatgctggccgagccgtcgatcccggagtcaaggcgcggctgcttgctgatcatattgatcgagccggagggcgcgctgcggccatagtccgtgccggcgggccctttgatgacttccacctgctgggtattgaaggtatcgcgcgtcacgctgccgatgtcgcgaatgccgtccacatagatgctgttagaggtatccacgccgcgcataaagatggcatccccggtggttgagctgccattctccccggcataaaacgccccgacgccgggaacgtttttgagggcgtcagtcaggttggtgacgccctgatctttaatcacctgttccgggatcacggtgatggtgcgggtggtatcgaccagcggtttattgaacttgggatcggcggaagcgccgggggagtagagtgaaggcggagcggcttccactaccagcgtctcttcactatttttgaccgaattttccgctgtgatgcctgctgccggcgaggctcccagacacagacctgtaaacaatgccaatgagttgaaactgccgaaaggcagagaagcgtttttttccatgataaatgcaggcttattttttgttatgagcacatatcacaccgcgcaaaagcgacgttattcgtcgtctggcttgcgctgacccggtgtgattctataaatgataaaaagaatagttatcatttgccttaatatttacatagaaaagttaaccttaaaacaactttcttcacttcgatttacataattcacattttttgaacgataaagcgggaatatagggaaagtgctgcagaataaggtcggtagcaagccgcgccgggcggggttaacttccgggcggccatatgatggttgttccggcacggatcaccagggcacggtacggccctggtaatccagatactccagtcccggacgttgccgtttgtcgagcaggacgttcaccaggcgtgggatcgtctcttcgatggtcagcggggcatctgccccgccgagctcggtgcggatccatcccggggccatcaccaccagcggatgggaggccgaggaggggcgagcggcgaagctgcgcatgaacatattcagcgcagctttactcccgcggtagagttcccgctggccggtaaggttattggtcacgctcccctggccggaggacatcacgccgagcagcccctgcggtttaacggcctgctgcaggcgctcgataacccgcatcggcgccagggcattggtgagcatcacctggtaaaactcctcggtggagacgtcgccaatggtctgcgatgggtcacgattggtggtgccagcattgacaaacagcatatcgaggcttgccgggggaagcgtcgcctgcagcgcggccagctgggcttcatcgcgaatgtcgagcgtcgccaggcgtagccgcaggggatgcgtcttggccaggtcgtggagcggcgtgtgggatgataaatcgcgcacggtgccgatgacctcccagccgtgctggaggaacgtcgccgccatagcatggccaaggccgcgcgaggcgccgacgatgaggatagtgttgtgctgatcggatttcatgatgtctctcgctgcagaaaggaggtcttcactataatcaggcccgagatcgggcggaagacgccgccagtgcactcatatcttgcagcaaacgccctgtctggcgactggagcgataatgaacgatcccgattttaatttgctggcggctctcgatccgctgccggtcagtaccgaggtgattacggtttcgcaggcgtggcatccgcgtctggagcaggccccggccaccgctggctgcggcagcgggtgcgtgaggtgtgtcgcgagtaaaaaaaagcccgcacaagtgcgggcaaaaatactggaagcaatgtgagcaatgtcgtactgaatacctgagtgatttactcaactattcagtgatgagaaagataatatttctcatttaagatatcaaccccatcttttgtgcggaagcgattttttatccgagggtgaaaaccgtgcgcttctggctgtcgtcctgcggccaggccgccgcgatctcctgcagtggccgcggggtggtggcgatggtcaatttccccggcaccgccgcctgcagcatttcaccggtcgccgccagcagctgcgataccgacaggctaccgatcccgctgcccatcagcaggagcggggcggaacgcagcactgcgccatttaacgcgatatcggcgccagccagggaacccacctgcacatagcgcaccggactgccggcaggggtatatttcgccagtgccggcaataataattccgcgctgtgtccccacaggtaatcgatgaccacatcgatctgcgcggcgctgaccgctgaaaattgcccgctcaagtttttatcatcagcggttaactgaatacactcatcggcgtccagcgccgccagcgactgcgcattgcgcccggttgcaatgatttttttcgcccccagatagcgggcaatctgcaccgccaactgaccggcgctgccggtggcgccgttaatcagcaccgtttcgccggcctgaagctgggcgcgtgtcaccagcgatgcccacgcggacataccggggttggccatcgccgccgcctggatatcatcgagcgcatccggcagcggcagacaattctgcagggcgaccggcgcccgctgcgccatactgccgaagggggcggtggggaaggcgaagtagacgcgctggccctgaggtgtggtgccgacgccatcgataccgggcacaaagggcagattgccgtcgaagctgtaatggcgtccggatgcccgggccttaaccacatggcttatcgcggcggcgcggacgtcaatgagcgtctggccgggcgcgggctgcgggtcgataaaatcggcccaaaccgggccttctgcgagatcaaaaaccacggctgctttcataaattatctcctgtcgggaattatgtgtaaaatacacatattgttttgcagcactatacgcggaaaattaatatatgcaagatgcacataatgactacgacattaccgactttcacggcgcgctgctggatatcatcagcgtaatgaaccagccgctgcgcgatgagcagatcctgcaggcagccggcatccagctggaacagatgctgtttccgctgcttgtggcagtagggcgccatggcccggtgggggtggttgagctggcggatcatttagggcgcgattacaccaccgtcagccgccaggtgaaaaaactggaagcccagggactcgcctgtaagcaaccgaaccgtcatgatcgacggatcagcgaagtgacgcttagcgccagcggacaacagatgatcgacagtattgcggtagcgcggcggcggttaatgaatcaggtgctggcgcagtggccggaagatgaagtgcaggcgctgtttcgcttaacgcgcaaatacgccgacagtttgcagcaaccaggctaaattctcgtgtgttgccgcctggcgcaacaatcagcttttgcgtcacaactcacgggtcagttcgtcgatgttgtcggaaagtatctccagcagggatctcacatagagagtgttgtttccctgatgccacatcgcgctgagggggagcccttcgacatgctttttcggcgtgagcgcaaggtatttcacgccgtcggcattcatgtctttataggacgctggcaccagagcaatgccgagtcctgcggcaacaaaactcaggatagtctgcttctcttcagcatactgcgcgatgacaggcatgctgcccccctctttgaaaatattcattgtcaggtcatggctgtgacgccgggtgcgtctttccggcaagataacaggctcgtgccgaaagtcatcgatactgacttcatcataactgaccagccggtgatgagcgggcacggcgagcacgcaagtttcattggcaataaatcgcgttgtcagcatggcatcaatgtgttccggcgggcgcacaaaaaccacatccagccaccctgaaatgagtcgggggataagtttgtgagatttatcttctgtaagatgaatatctgcttcaggaaaacgcctgacgaaaagattaagcaattcaggaagtaatcctttggctgcgctgtcgatagccccgatccgcaacgttcttttctgcaacaggctatttttccggaatcgctgccgtagcgcatcgaaatcagcaatgaccgttttggcctcatttaaaaaggcggcgccttcaggtgttagcgacacgttgcgggtcgatcgattcagtagcctgatccccaaatcatcttccagtagcttaataaagcgactcagtgacgcaggcatcatttcgagtttacgggcagcccggccaaagtgaagctcatcacctaacaccacaaagcaacgtagctgatttatatccattttttcaccaaaacctgattatacaaattatttatataaagccgagccgatgataaagcggttcaaaacttcatactgggattattacaaaacgataacaaccctacatcactatggagcatcccgtcatgaaaaacgacctcgaaaagaaggtgatgcgtaaggttaccctgcgcattattcctttcatcatgctgctgtacttcattgccttccttgaccgcgtcaacattggctttgccgccctgaccatgaatcaggatctgggattttcacccaccgtttttggtctgggcgctggaattttcttcctgggttattttctgtttgaggtaccgtcaaacttaattcttcataaagtgggcgcccgcatctggatcgcccgcgtcatgattacctggggattcgtctctggctgcatggcttttgtgcagggcacgacgagcttctacattctgcgttttctgctcggcgtggcggaagccggtttcttcccggggatcattctctatctcagctactggtttcctgccgccaggcgtgcgcaggtcactgccatctttatggccgcagctcccctgtcgacagcactgggatcgccggtttcggccgcactgctggagatgcatggcttccttggctacgccggctggcagtggatgtttgtactggaagctttgccggcgctggtgctcggtgttgtggttctgttcttcctgacggatcgtccggccaaggccaaatggctgactgatcaagagcgtgcctggctggaaaacgccatgcaagacgaggagcgggcacgggcggcaaaacagagccattccagcgcatggcgagggctagcggatatacgcgtcctggcgctggcgctggtctatttcggtacctcagccgggctgtatacgcttggcatctggtccccgcaaatcattcgcagtttcggtgcttcctcgctggagattggtttcctgaacgcctttccggcggtgatcggcgtcatcgccatgatcctctgggcgcgtcattccgatcgaaccaaagagcgcagctggcacgtcattggcgcctgcctgctggcggctgccgggctgatatacgccggtaatgtcagcacattgtttaccgtaatggtcgccttaacgctggtcaccgtggggattagcgcatcaaaaccccctttgtggagcatgccaaccctgttcctcagcggaccggctgcggccgctggcattgcggctatcaactccatcggcaacctcggcggtttcgttggcccgatgatgattggcgtgatccgcgagcaaaccggtagttacagctggggcctgtactttgtcgccggattgctggcgctctcggccctcgtggtcatgattctttctgccagagcgaacaaatcgccgacggcagagcttccacatcctcatactcattaactggagaagtaacgatgcgtcactacaaaattgctgccatccctgcggacggtatcggaccggaagtcatttcggcaggtattgaagtcttgcacgcgctgacgcgccacgatccgcaactgaaatttgatatagagacctttgactgggggtcagactattacaaaaaacatggcgtgatgatgccggaagaagggctgaacatgctgaaagcatttgatgccatttacttcggcgcggtgggggccccggatgtccctgaccacatcacactctggggcctgcggctgcctatttgccagggctttgaccagtacgccaatgtgcgacccaccaaaattctgccgggcgtcacttcaccgctgcgcaaccgcgggcctggcgatcttgactgggtcatcgtgcgcgaaaactccgaaggtgaatattctggtaacggcggccgtacccaccgtggtttacctgaagaagtcggtaccgaagtggcaatctttacccgtgttggggtgacacgcattatgcgctatgccttcagactggcacagtctcgtccacgtaaactgctgaccgtggtgaccaaatccaacgcccagcgccatggtatggtgatgtgggatgagattgccgctgaagtggcgcaggaattcccggatgtgcagtgggacaaaatgttggtcgatgccatgacgcaccgtatgacgttgcatccccagaccctggataccatcgttgccaccaatctgcacgccgatatcctttccgatctggctggcgcgctggcgggtagtctgggcgtagcgccgaccgcgaatattgatcctgaacgccgtttcccttccatgttcgaaccgatccatggttccgcattcgatatcaccggcaaagggattgcgaaccccattgccactttctggaccgcggtacagatgcttgaacatctgggcgaacgccatgccgctgcgctgattatggaaagcattgagtatgtgtgtgaaaaaggcattctgacgccagatgtcggtggctcagccaataccgcggaggtgacacgcgccgtggtgcactacattgacgctaaagctgacattgccgagaccgcataaacatgaataacgaacaggctgcagagatcctgcaggatatctttcaacatgcggtcaacagtgcccgcgccgggccggtgaccctggctaacctgccggaaaaacctcgcggccgttgtgtggtgatcggtgcgggtaaagcgtccgcggcaatggcggctgccgtggatgcggcctggccggatgtggcggtgtcgggcgtggtggtgacgcgttacggttacgcggttcctgcgggccgcatccgcattattgaggcggctcatcccgtatcagatgccatgagcgaggttgccgcaatgctgattgtggagacgctgcgcggtttaactgccgatgatctggtgctggcattgatttcagggggagggtcggcgctgatggcgctgcccgccccggggttaacgctggcagataagcagaccatcacccgggccctgctccatagcggggccaacatcaaagagatgaatctggtacgtcgtcatctctcagcggtgaaaggcggaaagctggcgaccatggcgcaaccggcgcgcatcgtatcactgattatcagcgatgtgcctggcgataatccgacggacgtagcgtctggccccaccgttgccgataacagcgcaccacgtgatgcgctccgggtactgcagcggtatggcattacgatcccgaagcccgttagcgaacggctaaaccagccggccggcccgatggaaaacgccgcgacaggcgaggtcaggcttatcgccacgccggcgatggcgttagcggcggcggggctggccgcacgacaacatgggttcaccccccttattttgggggatgctatagaaggtgaaagcagggaagtggcggtggtcatggccggtatggcgaaatcggcgaagcagtatggtcacccgatttcagggcctgctgtgctgttgtcaggtggcgaaaccacggtgacagtaaacaacactcagcctggaaaagggggccgcaataccgagtttttactcagtctggcctgtgcgctccagggggaacacggtatctgggccatggcgggagatagcgatggtattgatggcacagaagatgccgcaggtgcgatcgtcttcccggatacgcttgcgcgcggcaagctgagcggtcttaatgcagtgcaatatctggatggccatgatagttactgctattttcacgcgcttaatgatttgctgatcaccggcccgacgttaaccaacgtcaatgatattcgggcaatattgattgcctgactgtatcgctctcctgtgccagggagagcgatatttttccctttcaacatagttcaaatcttcggtatccgcccgccatccatttccacgctaaagcgcatcgcctggcgtcaaggtgtcgatcatcgggccgtctgatgtgttggcgtgcaagatgacatggaaaggaaggtaacgcgtggaaatcgccgcctggcgcgataccaggcggctgatggtcaggcggttttggtcgctgccttcaggctctggacgaaggctttcagctcgtcgagcatggtctgcggctcatcgaggtggcgttcgatgattttgacgatggcggaaccggagatagccccggcggctccggcgtcaatggcggcgctcacctgctccggcgcggagataccaaagccctgcagcggcggcgcggcgtgatattccgccagcttctccaccaggtggtgcagcggcagcgcggcgcgattttccgcacccgtcactccggcgcgcgacagcagataggtgtagccgcggccataagaggcaatctggcgcagtaaatcgtcatccgcattgggcgggcagatgaaaatcggtgcgatgttatggcgcatcgccgcctggcggaacggggcggactcttccaccggcacgtcggccaccagcaccgagtcgacgccgacgcgggcgcactgggcatagaacgcatcgatgcccgggctgaagacgaggttggcatacatcagcaggccgattgggatggtcggatgcttctggcggatcgccgccagcatctcaaagcactgcgccggggtcactcccgcggcgaaggcgcgcagggccgcgccctggatggtcgggccgtccgccagcgggtcggagaaagggatccccagttcaagggcatcagcgccgccttcgatcagcgcatcgataattttcagcgactgctccggtcccggatcgccaagggtgacaaaggggacgaaggcgccttcctggcgatttttcagttgggcaaacagcgtctcatagcgttccatcagatttcccctcgcgctttcaggatgtcatgtacggtgaaaatgtctttgtcgccgcggccggagagattaaccaccagcagctgctctttttccgggttctcgcgcatcatcttcagcgcgtgggccagagcgtgagaggactccagcgccgggataatcccttcgtggcgggaaagcgctttaaacgcgtccagcgcttcgtcgtcagtgatcgacacatagtcagcgcgaccggtgctgttcagaaacgcgtgctgcggcccaacggacgggaagtccagcccggcggaaatggagtaagactcttcgatctggccgtcggcggtctgcatcatcggcgacttcataccgaagtagatcccaacgcggccatgcttcagcggcgcgccgtgctcgccgctctcgataccgtgtccggcgggctccacgccgatcaggccgacgttggtttcctcgataaaatcagcgaacatgccgatggcgtttgatccgccgccgacgcaggcgatcaccgcgtccggtaggcggccctctttttcaaggatctgcgctttggtctcttcgccaatcatgcgctggaattcacgcacaatcgtcgggaacgggtgcggaccggcggcggtgcccagcatatagtgcgccttttcgtagctgccggaccagtcgcgcagcgcctcgttacaggcatctttcagcgtggcggagccgctgtgcaccgggatcacctcggcgcccatcaggcgcatacggaacacgttcggcgactggcgctcgacgtccttggcacccatgtagatacggcatttcaggccgagcagggcgctggccagcgctgaggcgacgccgtgctggccggcgccggtctcggcgataatttcggttttacccatccgtttggccagcagggcctggcccagcacctggttggttttgtgcgcgccgccgtgcagcagatcttcgcgtttcaggtacagggtggtgcgggtgccttcggtcagattccggcatttggtcagggccgtcggacgaccggcgtagtttttcagcaggtcggtgaattccgcctgaaaggccgggtccttctgcgcgctgacaaaggcttcttccagctggcgcagggcgggcatcaggatctgcggcacatacatgccgccgaattcgccgaagtaggggttcagtaaagtgctcattattgctccttaatatgcgcgcagcgtctggaatacggaggccagcttgctggcgtctttcatccctggttgcgactctacgcctgaattgaaatcgagtccggcacagccgcttttggccgcttccacacagttatcggcgccgaggccgcccgccagcatgacgttgcgcagatcctggccctgcagcaggctccagtcaaagcgctggccgctgccgccctggccgttgtcgagcaggtacttgtcgacatggtggagcgtacgggccgggaaggtttcgccgacgctcagcgctttccagatgcggacgttgtccgcgagggcgtcgcgcagcgcgtcgatataggcctggtcttcatcaccgtgcagctgcacggcggccagccccagagcctgcgcgcgggcgaccacctcctccagcggcgcattgcggaagacgccgacgtactgcagcggcgcagcggcgatcaccgctttggcctgggcgtcattcaccgctcgcggcgaggtcgggacgaagatcagcccaccgtaaatggcgccggactcccaggccacctgggcatcctgcgggcgcgtcaggccgcacactttgttctcgccgagcagcacgcgtttaaccgccgcttccagatccgcctgctccatcagggcggagccgatcaggaagccgttggcgaagtggctcagctcgcgcacttcggcataggtatggatgccggattcgctgatcaccgtgacatccgggccgagacgcgccgccagctgacgggtgcggttaaggtcaatcgacatatcgcgcaggtcgcggttgttaatgcccaccaccttcgccttcagggcgatggcgcgctccagttcctcttcattgctgacttcggtcagcacgcccatattcaggctgtgagccaccgccgagagctgacgatactgttcatcgtcgagcaccgagagcatcagcaggcaggcgtcggcctgatagtagcgcgccaggtagatctggtaagggtcgatggtgaagtccttacacaggatcggctgcggcgcgacctggctgacgatcggcaggaaatcgaagctgccctggaaatatttctcatcacacagcaccgagatcgccgaggcgtagtgcttgtagatgctggcgatcgctgccggatcgaaatcctcgcgaatcaaccccttcgacggtgaggccttcttgcactcaagaataaacgcggtgcgggtgccggccagcgcgtcatagaaattgcgctgcgtcggaacgatctcattttgaaaactggctaacggttgttgttgtttgcgggcttccacccaaatcgctttgtcggcaacgatttttgctaaaacggtttgcattatttaccctcttgccgctaaggcggtcactctgtcataggccgcgccgctgtgcagcacatccagtacctgctgagcgttagctttcagatcttcatgcccgtgtaaacgcatcaacatggcgacgttggcggcgacggcggcttcgtgagcggcttcacctttaccttgtagcaagcgcgtcagaatgtcacggttttcttccggggtgccgcccgccagctgcgcctgatggtaaggcgtcaggccgaagtcgtcggcggtcagctgatagcttttaatttccccgttatgcagttcggccaccaccgtaggcgcatgcagcgaaacttcatccatcccaccgctgtgcaccaccgccgcgcgctgataacccagcacgcgcagggtctcggcgatcggcagcaccagttccgggctgtagacgccaatcagcgccagcggcggatgcgccgggttgatcagcgggcccagcacgttgaacagggtgcgggtcttcagctgctgacggaccggcatcgcgtggcggaaaccggtgtggtacttcggcgcgaacaggaagcagacgcccagctcatcaagcgcggcgcgggatttatcggcgttcatatcgagattaatgccgaaggccgccagcaggtcagaagagcctgatttactggagacgctgcggttgccgtgtttcgccacttttaacccgcaggccgcagcgacaaaggcgctggcggtggagatattgatgctgttgctgccgtcgccaccggtgccaacgatgtcggcaaacaggtagtccgggcgcgggaacggcgcggcgttttccagcagcgcggtagcggcgccggcaatttcctgcggctgctcaccgcgcactttcatgctgaccagcgcggcggccagttgctcaggcttcacttcgccgcgcacgacggcggagaacagctggtggctctcctgctgactcagggtttccgcctggtacagcttctcaaggatcggctggagggtgttggtatgctccagcttctgcagcgcccaggccagggtctgctccagcagtcgcgcgccctgggtggtgaggatcgattccgggtggaactggaagccgcacacccgatccgcatcgtgacgcaccgccatcaccataccgttgaaattggcgttaatcgtcagcccggcgggaatattgctgccgaccagcgagtggtagcgcgccaccggcagcgggttagccagaccggcaaacatcgcctggccgtcgtgctcaatgctggaggctttgccatggaggatctcccccgcctggccgacatagccgccgtaggcttcgacaatggcctggtggccgaggcagatgccgatgatcggcagcttgccgcgcatacgggtcagcagctccggcatgcagccggcttcgcttggcgtacccgggcccggggagagcatcagcaccgggttgtccatggtgcccagacgctcaatcagcgcctgcgccggaacggagttgcgataaatcactacgttatggccgttggcgcgcagctggtctgccaggttataggtaaaggaatcgatattatcgagcagcagaatgtcagccatcagaaaatctccttcgcgtgatgggcctgggcaatggcgcgcagcaccgcgcgggctttatttcgggtctcatccgcttccgactggggaaccgagtcgagcacaatgccggctccggcctggacggtagcgataccttcctgcacgtaggcggaacggatgacgatgcaggtgtcgaggtcgccgtgggcggtgaaatagcccaccgcgccgccgtagctgccgcggcgtttaccttcggcggcggcaatcagctgcatggcgcggaccttcggcgcgccgctgagggtgcccatattcatgcaggcgcgataggcgtggaggacgtcgagatcctgacgcaattcgcctactacacgggagaccagatgcatcacgaaggagtagcggtcaaccttggttaaatcagcgacatagcggctgcccggggtgcagatgcgcgccaggtcattacgcgccaggtccaccagcatcaggtgttcggaaagctctttatgatcggtgcgcatttccagctcgatgcggctgtcgaggtcgcgatccagcgagccgtcggcgcggcggccgcgtggccgggtgccggcgatggggtagatctcaatctgacggctgacggcatcatacttcagcgagctttccggcgaggcgccgaacagggtgaaatcattgtcctgcataaagaacatgtacgggctggggttgctcttcttcagcacatcataagcggccagcggcgatgggcagggcagcgagaagcggcgggaaggaaccacctggaagatttccccggcgcggatcgcgcgctgcattttgcgcaccaccgcgccgtactcttcatcgctctggtcaacgtcgcagcgcatttcggccacggtggtaaccggtagcggcgccggcggctcgttcagctgctgacgcagctggctcaggcgctgctccaggcgctgtttttcactctccagcggggtgaacaggctggcctgaatgcgggtatgcttggtctgatggtcgatgaccagcagggtttccgccagatagaagcagtagtccgggcaggtggtgtcgctttgcaactggggaagatcttcaaaaccggccaccaggtcataggcgaacaggccgccgaagaacatcgcttcgcgctcgttgtccggaacgctcaccagctcctgcaggagacggaaggcgtcaaacaccgacagtgagcagagacgggcgtcttcatcgagcagggcgctgacggccgggaaggtcaggatgcggccgttgggctggcgctgattgatgatcccggagggcagcgcgccgtccagtagttccagcagcgccgcgccgttggcggagagggcctgaatagtgacagtgtcaccaagggccgtaatgcgcagcgcgctatcgaccagcagtaggctttttaagtcatctttgctgtcgatgtcagcggattccagcagcagcgtcgccggacgggcgccgcacagttggtggaataacgccgtcgggttctcccggtagatggcgtcgctggtgagaagctcgagtgccggtttggatgtttgcattattgttctcgcctgttcgtattatttttgtccaataaaaagcccgctcattggcgggccgggtatctgtatgctgaatgcaaaacgcgatcacgccgcccgtcgtcaggaggtgcgccaccagctgtgcagagtgataaagtgcattttcatcgtgataccccttcatgtgaacttgcgtactagttaactagttcaatggaataaagtcaacccttgtttgcagattttctctgcctgtcggtatgataatgcgcttatttacgttgatgtccagcaggagtccttttgagcgacagccaatacgcagtgatttacgatctgcacagccataccaccgcctctgacgggcggctgactccgcaggaactggtccatcgcgcccatgagatgcgcgtcggcaccctggcgatcaccgaccatgacagcgtggcggcgatcccggcggcccgggaggagatcgcccgcgccggattacccttgaccctggtgaacggcgtcgagatttccaccctttgggagaatcacgagattcatattgtgggtctgaatattgatattgcgcacccaacgatgaccgccctgctggaggagcagaaagcgcggcgccagcagcgcggtcagatgattgccgagcgcctggagaaggcgcggatccccggcgcctgggaaggggcgctgcgactggcggacggtggcgccgtcacccgcggccattttgcccgttttctggtggaggccggccatgcgaaaaacatggcggaagtcttcaaaaaataccttgcccgcgggaaaaccggttacgtgccgccgcagtggtgtacaataaaacaagcgattgatgtgattcatcattctggcggcaaggcggtgattgcccatcccgggcgctacgatctctccgccaagtggttgaagcggctgttggcccactttagcgagcagggcggtgatgccatggaagtggcccagtgtcagcaggcgccccatgaacgcgcccagctggccaccctggccgtgcagtttggtcttctggcgtcgcagggatccgattttcatcagccctgcgcgtggatcgaacttggccgtaagctctggcttcctgccggcgtggaaggcgtctggcacagttgggaagcggccgccgaataaaaattgagagggaagtatgagccagtttttttatatccatccggataacccgcaggcgcggttgattaaccaggcggtggagattgtgcgtaagggcggggtgatcgtttatcctaccgactccggctacgcgctgggctgcaaaattgaagacaagggggcgatggagcggatctgccgcatccgtcagctgccggacggccacaactttaccctgatgtgccgcgatctgtccgagctgtcaacctacgcttttgtggataatgtggcatttcgcctgatgaaaaacaacacgccgggcaactatacctttatccttaaggggaccaaagaggtgccgcgtcggctgctgcaggagaagcgtaaaaccatcggcatgcgcgtcccgtctaaccccatcgctcaggcgttgctcgagaccttaggcgagccgatgctctccacgtcgctgatgctgcccggcagcgactttaccgaatccgacccggaagagatcaaagatcgtctggagaaagtggtggacctcatcattcacggcggtttccttgggcagcagccgaccacggttatcgatctcactgaagacaccccggtggtgctgcgcgaaggcgtcggcgacgtgaggccgtttctctaaggctatctgccgggcggtgcatcatgcgccgtccggtaccccgcgttttcgccccgacggcacgataatcatccatagcgctacacaaaccagcagcgcgccgagaatcaatcctttctccactgtctctccgaggcagagatagccccacagcgccgcaaaaggtgggatcaaaaaggtcaccgacagcgaacgcagcggccctatatctgcaatcaagcggaagtagataatataccctgccgccgtgcagaccacgcccagcatgactatcgctatccacggcagactctgccgccagtctacggcaggcccatgccagcaggaccagagaaagaaaggaaacagaaacagcgtggcgccgacctggctacccagcgcgacgcgttcagcctcgaggccgcctcgctgctggatccagcggcgggtcagaaagccggccagaccgtaacaggcggtcgcggtcaggcaggcgccaatccccggcagcagcagggcggcgctaaggccagacgtcgggcgcgcgatcaccgccacgccaatggcgcccagtatcgcgccgccgcctttgcgcagggttaacggttctgcaaagcataacgcgccgatcagcacccccatcatcggcgccgtggcgttaagcgtggcggagtaccctgccggcagccattgcgcggcaaggcagtacatgagaaaaggaaggcctgaattaatgacccccagctgcagagtggatgtgaattttccctgatacccgctccatttaccctgcacgccgagtaacagcccgagcgcgatagcggcgaacagtacgcgaagaaaagcgctgttcaacgccccgaaggccggggtggtgatgcgcataaacaaaaagctggcgccccagagggcggcgagcagcagcaggcggccatagtcgataacacgcatgattgactccttgtagtcacgaaggaagtcaactgtagaacccacgtgcagcgtgcgacaaacgcgttatgcttacatgattaagtttttcttaaccgaggttccatacccatgaaactcccgccgctgaatgcgttgcgctgctttgaggcggcggcgcggctgctcagcctgaagctggccgccagtgagctttgcgtcacgcccagcgccgtcagccagcagattgcccgccttgaggagacgctgaatgtcccgctatttatccgtactccgcgacggttacagttaacggcggtgggagagatctacctgcgggccgttcagccggcgtttcatcagatagccgccgccacccagcgtctgcaggtgcccccgggaccagaaaaggtagctatcagctgtaccagcggcttcgccattcagtggctgctgccgcggctggctgattttgaacaacgctatccgcagatagagatccagatcggcaccaccaaccggcgagtggatttgctgagtgaagggatcgattttgccgtgcgtcatggtgtcggcggctggccggaactgcaggcttaccgcctgctggatgacgacctgatgccggtctgtagcccgcaactgattgctccgcgccggacgctcaccgatgcgagcgatctactgcagtatccgctgctgcacgatgaacatcgtgaagactgggcgctgtggtgtaaggccgtggggctggcgccgcacttcgcgcggcgtgggccggtgttcactgattccaacggcgtgacggaggcggcgttcgccggtatggggatggcattactgcgacgctcattcatagcgcctgcgctgacgcaggggcggctggttaatcctctggcgcagcccatcgcctgtccgctggcctatcatctggtttaccacgagaccgcgctgctggcgcctgccaaccgctgttttcgcgactggctgcttggccagcgcccggccgttgctgaggagcgcgcgtaatgaggggggcgctgtccgataaagatccgtatgcgtgaatgggcacaggagaatgaggaaaatctgttccatactaaagacggggcgcggcgaacagaagctttcccgacgaagttagtgtagtatgttcggccacgaatacgggctcgcggtggatatcctgaacgcgccgacgagactttacgttaaaagtatatacgtaacaatgagttgtgcttttggcctcattgtttcataaagcataccagacgcctgggaaggcgacaccttaaggaagctcaatgagcgagaaactgcaaaaagtgctggcccgcgccggccacggctcccgccgtgaaattgaagcgaaaatcgaagctggccgcgtcagcgtcgacggcaaaatcgccaccctcggcgatcgtgtggaaattgtccctggtttaaaaattcgtatcgatggtcatctgatctcggtgaaagagtctgccgagcagatctgccgcgtgctggcttactataaaccggaaggcgagctgtgcacccgtaacgatccggaaggacgcccgacggtgtttgatcgtctgcctaaactgcgcggcgcgcgctggattgccgttggtcgtctggacgtgaatacctgcggcctgctgctgttcaccaccgatggcgaactggccaaccgcctgatgcacccgagccgtgaagtcgagcgtgagtacgccgttcgcgttttcggccaggtggatgatgataagctgcgccagctgtcgcgcggcgtacagttagaagatggtccggcagcgtttaaaaccatcaaattcaccggcggcgaagggattaaccagtggtataacgttaccctgaccgaagggcgtaaccgcgaagtgcgtcgcctgtgggaagcggtcggcgtgcaggtcagccgtctgatccgcgtgcgctacggcgatattctgctgccgaaaggcctgccgcgcggcggctataccgagctggacctggcgcagaccaactacctgcgcgagctggtggagctcacgccggaaaccagctctaaggttgccgtcgagaaagaccgtcggcggttgaaagccaatcagatccgtcgggcggtgaagcgtcacagccagaccagcgctaatccgcgccagggtaacaacagcaaccgtcgttccagtactcgcaataagactaacggttaatgttatgcgttccggtgacttgccgccggaacgcgtacttcctccgcgctatcaggcccttagtagtcaatccccatctgcgctttaatcccggcatcaaatgcatgcttgaccggacgcagttcgctgacggtatcggccagttcaataatatcgcgatgacagccgcggccggtgatgatcaccgactgatgggcagggcgctcacgcagggcgctcagcaccgactccagcggcaggtaatcatacgccaccatgtaggtcagctcgtccagcagcaccagatcgagctggtcgtcagcgagcatacggcgggcatgctcccagaccgccaggcaggcggcggtgtcgctgtcgcgatcctgggtgttccaggtgaaacctgtggccatcacctgaaattcgacgccgtgaggctccagcagattacgctcgccgttaggccaggtccccttgataaactggatcacgccgacttttttgccatggccgacggcgcgggtcgcggtgccaaaggcggcggtggttttgcctttgccgttgccggtaaagaccatcacaatgccgcgctcgtcctgggccgccgccacccgggcgtcaactttatctttcagccgctgctggcgttcgcggtagcgttcatcactcattgggcaattcctggtttacgtcccggttgggcgtcgaaggtcattcccgtcttgcgacgactgtcgtcacccatcagccacagatagacgggcataatgtcagcgggggttttcagtttcagcggatcttccgtcgggaacgcgctggcgcgcattccggtgcgagtgccgccggggttgatacagtttacccgcaggtggcggctttgatactcgtcggccagcacctgcatcatcccttcggtggcgaatttggaaacggcataggcgccccagttggcgcggccctgacgaccgacgctggatgaggtgaagaccagcgagcccgattccgaacggagtaataaaggaagaagcgcctgggtcagcataaaggtgccattaacgttcacctgcatcacctgctgccagacctccggcttctgctcttccattgggcagatgtcgccgagcaggccagcgttatgcagcacgccgtcaaggcggggatagtgcatgctgatctgctgcgccagctgctggcacgcctggggcgtacaggtgagcaggtcgagggtaaaccagcgagggggaataccaccctcacgctcaatctcctgggcgacggtgcgcagtttgtcgtcgttgcgacccagcaggataacgctggcgctatagcgcgcgtaggtcagggccgcttcacgaccaatcccgtcgctggccccggtgaccaggatgatgcgctctttcagcaagtgacgttgtggttgataatgcacggcaactccttgggcgatcggttcccgatcgcgcttcatctttggtatctcacttttgcgctgttatgcctgaaagcgcccgccattgcaatcggcgaagcggaaagtattcacaaaattaatatcttgcaacgatttcagccgcgcgaaaaaaaacggaatccgctgcgcagagaacacaaagcacaaagacttctcgccagcggctgaggtacactgtgcagcaacgtcagtgctttacacaaggtgaaaacgtggaattacttgctcagtacggcttatttttagccaagatcgcgacggttgtcgtcgccatcgcggtgattgccgctattatcgtcaacctcgctcagcgcaagaagcagcgcggcgagctgcgggtgaccaatcttagcgagcattataaagagatgaaggaatcgctggcggtggcgctgctggacggcccgcagcagaagcagtggcataaggcgcagaagaaaaagcaaaaacaagaggcgaaggcggccaaagcgcgggcgaagctgggtaatgccgagccggaaggcaagccgcgcgcctgggtgctggatttcaaaggcagtatggatgcccatgaggtcaatagcctgcgggaagagatcaccgcggtactggcggcggcgaaagcgcgcgatcaggtggtgattcgcctggaaagccccggcggggtggtgcacggctacggtctggccgcctctcagctgcagcgcttgcgcgacaagcagatcccgctgacggtggcggtcgacaaagtggcggccagcggcggctatatgatggcctgcgtggcgaacaaaattgtctcggcgccgtttgcgatcctcggctctattggcgtggtggcgcagatcccgaacctgcaccgcttcctgaagaataaagatatcgatatcgaactgcacaccgccgggcagtacaaacgaacgctcaccatgctgggcgaaaataccgaggaagggcggcgcaagttccgcgaggatctcaatgaaacacatcatttgttcaaggatttcgtccaccggatgcgtccgggacttgatattgagcaggtggccaccggcgaacactggtacggggtgcaggcgctggaaaaaggtctggtggatgcggttgaaaccagcgatgagctgctgctggggctgatggagagccacgaggtgatcggggtgcgttatcaacagcgtaagaagatgctcgaccgctttaccggtagcgcggcggagagcgccgatcggcttctgctgcgctggtggcagcgcggtcagaaaccgctgatgtaaataacataacgcgaggcctgggcctcgcattattgttttcactggtcttaatcgaccaggtggtacttgtccgacagctcgtgagcaagatacttaaacatgttaaataccgctgtactcttcggcgtcggtagtccctgctcatcaaggtaaaactcaccgctaaacaccaggacattgttgcgctgaacgacgtcggtggcttcgataccggctaacgtatcctcatgttcgcgaataagtttgttggctttttcgagcagcgtctggcgatcgattggttgggttgtaccttgcataacggactcctctttttctccgcgcgtagtttacgccgcgcggcggcgtggggcaaattttccatgcataaatcaggggtaatggtaaccagtggagaaacagccgtttactggcgggatttgcttttgcatgctaataaagttgcgtaacgaattttatcaggtacagtgtgacgctttcggcgatctggcaacagatttgcttgacattcggccaaaaattcttcgtgctatgtcacctgacgagaaaaagtcagcaaactcaagcgcctggttttacggagatgaaacgggtgttcagggttgatattcaccgacggtgccgcaacatatgaggcagtcgccagtggagggtgtatgaatgtgcgatgtattcctggatgaatcaaattaggtaaaggtgaatatgggtaaagctctcgttatcgttgagtccccggcaaaagccaaaacgatcaataagtatctgggtaatgactacgtggtgaaatccagcgtcggtcatatccgcgatttgccgaccagtggatcagcttccaaaaagagcgccgactctaccgccaccaaaggggctaaaaagcctaaaaaggacgaacgtagtgctctggttaaccgtatgggcgtggacccatggcatgactggaatgcgcactatgaagtacttccgggtaaagaaaaggtagtttcagaactcaaacagttggcggaaaaagctgaccacatctatctcgcaaccgaccttgaccgcgaaggggaagccattgcctggcacctgcgggaagtcatcggcggcgatgaacagcgttacagccgcgtggtgttcaatgagatcaccaaaaacgctattcgtcaggcctttgaaaagccgggcgaactgaatatcgatcgggttaacgcccagcaggcgcgtcgttttatggaccgcgtggtgggctatatggtttcgccgctgctgtggaaaaaaatcgcccgtggtctttctgccgggcgcgtgcagtccgtcgcggtccgcctggtggtggagcgtgaacgtgaaattaaagcgttcgtcccggaagagtactgggaagtcgacgccagcaccaccacgccgggcggtgacgccctgccgctgcaggtaacccataaggatgataagccgttccgtccggtcagccgtgatgagaccatggcggcggtatcgctgctggaaaaagccagctacagcgtactggagcgtgaagataagccgaccagcagcaagccgggcgcgccgttcatcacctccaccctgcagcaggcggccagcacccgtctgggcttcggcgtgaaaaagaccatgatgatggctcagcgactctatgaggcagggcacatcacctatatgcgtaccgactccaccaacctgagtcaggacgcgctgaacatggttcgcggctacatcagcgacaaatttggcaaaaaatatctgccggatagcgcgaaccagtacgccagcaaagaaaactcgcaggaagcgcacgaagcgattcgtccgtctgatgtgaacgtgctggcggaaacgctgaaagatatggaagcggatgcgcagaagctttatcagctgatctggcgccagtttgtcgcctgtcagatgacgccggcgcagtacgactccaccacgctgaccgtggctgcgggtgatttcaaactgaaagcgcgcggtcgcactttacgtttcgacggctggacaaaagtcatgccggcgctgcgcaagggcgatgaagaccgaacgctgccgctggtcaaacagggcgaccgcctgagcctggtggagctgacgcctgcgcagcactttaccaagccgccggcgcgtttcagcgaggcctcgctggtgaaagagctggaaaaacgcgggattggccgtccgtcgacctacgcgtcgattatttcgaccattcaggatcgcggctacgtgcgggtggaaaatcgtcgtttttacgccgaaaaaatgggcgagatcgttaccgaccggctggaagaaaacttccgcgatctgatgaactacgattttaccgcgcagatggaggatcgcctcgaccaggttgcgaaccaccaggccgagtggaaagaggtgctgaaccacttcttcggcgattttaccacccagctggcgacggcagagaaagatccggaagagggcggcatgcagccgaacccgatggtgctcaccagcatcgactgcccgacctgcggccgtaaaatggggatccgtaccgccagcaccggcgttttcctcggctgttcgggctatgccttgccgccgaaagagcggtgcaaaaccaccatcaacctggtgccggagaacgaagtcctcaacgtgctggaaggcgatgacgcggaaaccaacgcgctgcgcgccaaacgtcgctgccagaagtgtgggacggcgatggacagctaccttatcgatcctaagcgtaagctgcacgtctgtggtaataacccgacctgcgacggctacgagattgaagagggcgaattccgcatcaagggctatgacggcccggtggtggagtgcgagaagtgcggttctgaaatgcacctgaaaatggggcgtttcggtaagtacatggcctgtaccaacgacgagtgtaagaacacgcgtaagatcctgcgcaatggcgaagtggctccgccgaaggaagatccggtgccgctgccggagctgccgtgtgagaagtctgacgcctactttgtgctgcgcgacggggcggcgggcgtcttcctggcggccaacaccttcccgaaatcacgggaaacgcgtgcgccgctggtggaggagctgtaccgcttccgcgatcgtctgccggaaaaactgcgttatctcgccgatgcgccgcagcaggatccggaaggcaataaaacgctggtacgctttagccgtaaaaccaagcagcagtacgtggcgtctgaaaaagagggcaaagcgaccggctggtcagctttctttatcgacggtaagtggacggaagccaaaaagtaatggcgttcgttcgggcaggaaaagcgcgcttttcctgctcaggcgaccggcagagagagtgcatttctctgccgtgtcgtcttcccctctttgcgttaatttcctccccttataaccacctatattatttttcgttagcgtctatacagtgttgatataaatgatatagtggttatagttaatgccttttttattattaaaacgtcttatacatcatcgctttcaggatgcattgcggcgccactatggccaactgccgggagcccagggccttcatcggcgacaagttgcctgaacgtaaagtgtattaagcggcttcattttacgcgcaaacggatatcagccatgaaactacaacagcttcgctacatcgttgaggtggttaaccataacctgaatgtttcatccaccgccgaagggctctatacctcccagccgggtatcagtaagcaggtccgcatgctggaggatgagctgggcattcagatctttgcccgcagcggtaaacacttaacccaggtgacgccggccgggcaggagatcatccgcatcgcccgcgaagtgctgtcgaaagtcgatgccatcaaatctgtcgccggagagcatacctggcctgacaaagggtctctttacgtcgccaccacccatacccaggcgcgctatgcgttaccgggagtgatcaaggggtttattgaacgctacccgcgggtgtcgctgcatatgcatcagggctcgccgactcagattgcggaggctgtgtcgaaaggcaatgccgatttcgccatcgccaccgaggcgctgcatctgtatgacgatctggtgatgctgccatgctatcactggaaccggtcgattgtagtgacccccgagcatcctctggccaccaagggctcggtgtccatagaggaactggcccagtatccattggtaacctatacctttggttttaccggccgctccgaactggataccgcgtttaaccgtgcgggcctgacgccgcgcattgtttttaccgccaccgatgccgacgtcatcaaaacctatgttcgcctggggctgggggtaggggtaatcgccagcatggcggtggatccggtctctgacccggatctggtgaagctggatgcgaacggtattttcagccacagcaccactaagataggtttccgccgtagcaccttcttacgaagctacatgtatgattttattcaacgttttgctccccatttgaccagggacgtggtagataccgcggtggctttacgctcgaatgaagatattgaagcgatgttcaaagatataaaacttccggaaaaataaccctgaaaataataatggcactccctgcgaggagtgccattaactatgatggactgtatttaacaacttaaacctcgaaccaatcacaaaattaataatttttggcaacacgtttttcattatgcccgccgcgatcaaataaccggttaaatatattccatcaggcctaaattcactggattaatcttttatccataattaagatttatctgtacctgatgatttgagcaattggtggtgacaatatgataagtaatatcgattacatgaaactggcgatgtcatacgagaatgacaaaaccgaaatcgatcccgttctgcgtagtcgcgtatggggcgtagtgttggtagggttggcgatgttctggagcatcatcgcgctcaccatctgcaacatctggattgtcagctaaagctgtaggtcatcgttgtagatacatgtcatttttatgacagtgaaaggaaactgtaatataaaatcagtgaccggcaatacagggagaatatattttgccgctggattcatccaacctgaaatcactcaccagagctaatcactgcccgctggccgattagctctttttttgtcctcgtgtactaatacaatatcggcatacgccctctttgcactattttggtgctatttcgcctgctctcggataattcccgtttcctctctctctgtctcgtcgtatttagcaatttgggttgttatcaaagtgttatgctcagtatgtgttatctttaatggagaccctgaggagaatcagggtatgccatccctgagataaaggaggagctatgtcgtcaaccctacgagaagccagtaaggacacgctgcaggtcaacgataaaacctggcattactacagtctgccgttggcggagaagcaactgggcgagatcagtcgactgcccaagtcgctgaaggtgctgatggagaacctgctgcgctggcaggacggtgactcggtaactgaagaagatattcgcgccctggccggctggctgcaacaggcccatgccgaccgggaaatcgcctaccgtccggcacgcgtcctgatgcaggactttaccggcgtgccggcggtagtggatctggccgccatgcgcgaggcggtgaaacgccttggcggcgatacggcgaaggttaatccgctatcgccggttgacctggtgatcgaccactcggtgaccgttgaccgcttcggcgacgacgaggccttcgaagacaacgtccgcctggaaatggagcggaaccacgaacgctacgcttttctgcgctgggggcagcaggccttcagccgcttcagcgtggtgccgccgggcaccggtatttgccaccaggtgaacctggaataccttggccgggcggtctggagcgaggaggtgaacggccagtggatggcgtggccggatacgctggtgggcaccgactcccataccaccatgattaatggtcttggcgtgctgggctggggcgtgggcgggattgaagcggaagccgctatgctgggccagccggtgtcaatgctgatccccgatgttgtgggctttaagctcagcggcaaactgcgcgaaggcatcaccgccactgacctggtactgacggttacccagatgctgcgtcagcatggcgtcgtcggcaagtttgttgaattctacggtgacggcctggataccttaccccttgccgacagggcgaccatcgccaatatggcgccggagtatggcgccacctgtggctttttccctatcgatgacgtaacgctcagctatatgcgtctcagcggccgtagcgaagaacaggtcgcgctggtggaagcctacgctaaagcccagggcatgtggcgccagcctggcgatgagccggtctttaccagtaccctggcgctggatatgagcagcgtcgaagcgagcctcgccgggccgaagcgaccgcaggatcgcgtggcgctgggcgatgttccgaaagccttcgccgccagcggcgagctggaggttaaccaccttcagcgtcagcgtcagccggttgactatacgctgaacgggcatcactattcgctaccggatggcgcggtggctattgcagcgattacctcctgcaccaatacctctaaccccagcgtgttgatggccgccggcctgctggcgaaaaaagccgtcgaacgcggcctgcagccgcagccgtgggtgaaagcttctctggccccaggctcgaaagtggtgtcggattatctggcccatgccggcctgacgccttacctcgaccagctcggcttcaatctggtgggatatggttgcaccacctgtattggtaactccggtccattgcctgaacctatcgaagaagcgatcaaaaaaggcgatctgaccgtcggggcagtgctctccggtaaccgtaacttcgaagggcgtattcatccgctggtgaaaaccaactggctggcctcgccgccgttggtggtcgcctatgcgctggcggggaacatgaatatcgacctcacccgcgagccgttgggacagggcaagaatggcgagccggtctatctgaaagatatctggccgagcggggaggagattgcccgcgcggtggaacaggtctccaccgagatgttccgcaaagagtacgcggaagtgttttccggcactgaggagtggaaggcgatcaaggtggaggcgtcagatacctacgactggcaggaggactcgacctatattcgcttgtcgccgttctttgacgagatgggcgtcgagccgctgccggtagaggatattcgcggcgcgcggatcctcgccatgctgggcgactcagtcaccacggaccacatttcgccggcggggagcatcaaagccgatagtccggcaggccgctatctgcaggagcatggggttgcccggcgcgactttaactcctatggttcccgtcgcggtaaccatgaggtgatgatgcgtggcaccttcgccaatatccgcatccgtaacgaaatggtcccaggggtggaagggggtatgacccgccatctgccggatcctgaaccgatggcgatttacgatgcggcgatgctgtacaaggctgagggcacaccgctggcggtgattgccggtaaggagtatggctcaggttccagccgtgactgggcggcgaaggggccgcgcctgctggggattcgggtagtgatcgccgagtccttcgagcgtatccatcgttccaacctgatcggaatgggcattttgccgctggagttcccgcagggcgtcacccgcaaaacgctacggttgaccggggaagagcggattgatatcagtaatctgcagtcgcttcagcctggcgctacggtgccggtgaccctgactcgcgctgacggctcgcaggaagcgatcccttgtcggtgccgtatcgacacggcgacagaactcacctactaccgcaacgacggcatcctgcactacgttattcgtaatatgctgtgaaacaaagggccagcatcgctggccctttttcggttattccaccggtttattctgtcggcttgctgttcagcagatggcccatcttggcggctttggtgtccagatagtgagcgtttttcgggttacgcccgacgatcagcggcacccgctccacaatgttgatcccggcttcggtaagaatttccacttttttcgggttattggttaataaccgcacctgctcaacgttgagcaatttgaacatgtcggcgcacaaggtgaaatcgcgctcatcggcggcgaagccaagctgatggttcgcttcgacagtgtcgtagccctgatcctgcagcgcgtaggcgcggatcttattcaataaaccaatgttgcgtccttcctggcggtgatagagcaggatcccccgaccttcttcagcgatatgcgacagagccgcttccagctgaaagccgcaatcacagcgcaggctaaacagggcatcgcccgtcaaacactctgaatgtacgcgggcgaggaccggcgactgccctgatatatcgccatacaccagcgcgacatgatcctgtccggttgccagttcttcaaaacccaccatcaggaaatcgccccagggggttggcagtttggcttctgccacacgtttaagctgcatgtgattctccagattctgtcagcacctgactgtgctttctgtttcccgctattttgccacaacgcctggacgttctcctaatcgcgaacggttagccgtgtggaaagcgcacaaacgatctactttccgctatgatgttcatctacaaggagaaggagagaaaatgctgttgatagcccgacgaactgctctcgcggcggcgctgctgctggttatgcccctcacggtctggctttccgggtggctgtggcagcctggactgccggttgccatgttgaaaagcctgtggtgggtgacggaaacggtgacccaaccgtggggaattatcactcatgtcgtgctttgcggctggttcctctggtgtctgcgctttcggctgcgcgcggcgttgatcctgttccttatccttgccgccgctatcctggcgggacagggggcgaaatcctgggtcaaggcgcgggtccaggagccgagaccgttcgtcatctggctggaaaacacaaggcaggtgccggtgacgcaattctacgcgttaaagcgtaaagaacgcgctaaactggtgcatgaacagctggcgcaggcgcaggacattccgtcatttttacgcaaacactggcagaaggagacggggtttgctttcccgtcaggtcacaccatgtttgccgccagctgggcgttactcgctgcgggactgctgtggccgcgtcgccgctggggcacaatcgcggtgctgctggtgtgggcgacggcggtgatgggcagtcgcctggcgctgggcatgcactggccgctggatctcatcgtcgccacgctgatctcctggctgctggtcacggtggcctgctggctgacgcagcgcctttgtgggccgctctcgccgcccggagaagaggcgcaggatattaaaaaacggatgcctgaagcggaataatgttgattttggcggcatccgaccgcatatcctgaagagttgccatgctttttcattccaccgctgcggcgaaaatgatactttatagggctgaaagcgggcttttttcgcgcaacccacataacgggaagtcatgtgaaatatttactcattttcttactggtgttagcaatcttcgtcatttcagtgacgctgggggcgcagaatgaccaacaggtcactttcaactatttactcgctcagggtgaattccgcatatcgacgctgctggcggtgctgtttgccgcgggctttgccattggctggctgatctgcggcctgttctggctgcgggtgcgtgtctcactggcgcgcgcggagcggaaaattaagcgtcttgagcatcagattgcccccgtcagcccggcggctgtcgacgcaggcgtgcctgcggtgaaggaataacctcttatgctggagttgttgtttctgcttttacccgttgccgccgcttacggctggtacatggggcgcagaagtgcacaacagtccaaacaggacgatgcgagccgcctgtcgcgagattacgtggcgggggttaacttcctgctcagcaaccagcaggataaagccgtcgacctgttccttgatatgctgaaagaggataccggtaccgttgaggcgcacctgacgctcggtaatttgttccgttcgcgcggcgaagtcgaccgcgcgatccgaattcaccagagcctgatggaaagcgcgtcgttaacctacgatcagcgcctgttagcggtgcagcagctgggacgggattatatggccgccggactgtatgaccgcgcggaagacatgttcaaacagctggtggatgagaccgatttccgcctcggcgcgctgcagcaactgctgcagatttaccaggcgaccagcgactggcagtcggctattgaagtggctgaacggctggtgaagctagggaaagagaaacatcgtggcgaaatcgccaacttctggtgcgaactggccctgcagcagatggcagccaacgatctggataaagcgatggcgttgttgagaaaaggcgccgccgcggaccgcaccagcgcccgggtatcgatcatgatgggccgggtgtggatggaaaagggcgactacgccaaagcggtggagagcctcgagcgggttatcgatcaggataaagagctggtgggtgaaacgctggagatgctgcagacctgctaccagcagctcggcaaaaccgatgaatgggaagtttttctgcgccgctgcgtggaggagaacgccggggcgaccgccgaactgatgctggcgcagatcctcgagcaacgggaaggcgtcgaagcggcgcaaaactacgtcacccggcagctggaacgccacccgaccatgcgcgtcttccataagctgatggactaccatctcaacgaagcggaagaagggcgggcgaaagaaagccttggagtgctgcgaaacatggttggtgagcaggtgcgcagcaaaccacgctatcgctgccagaaatgcgggtttaccgctcatacactttactggcattgtccgtcctgccgctcgtgggcgaccattaaacctattcgcggtctcgacggccagtaaagccaaaaaaaagccctccgttagttacaacatacttatcgcttcactcctctccaggcgcggccccggcagcgccatcgtccggtcagggcaggtacggcagtctgttattttgttcgcttcacaggtagaatgctgcccgtttaccttttttgcgccaccccggcgcccatcaacactaaggtctggtcatgacgtctacagctatcccatcttcccgcgctgtcacatcctctcccgttgtggttgcgctcgactatgataatcgcgataaagcgctggcatttgtcgaccgcatcgacccgcgcgactgccgcctgaaggtgggcaaagagatgttcaccctgctgggcccgcagtttgtccgcgatctgcatcagcgtgggtttgaggtgttcctggaccttaagtttcacgatattcccaacaccaccgcccgcgcggtggccgcagcggctgagctgggcgtatggatggtgaatgtccatgcttccggcggcgcgcgaatgatgaccgccgcgcgcgaagcgctgctgccgtttggcaaagatgcgccgctgctgatcgctgtcacggtgctcaccagcatggagtccagcgatctacaggatctgggcattaccttatctccggctgactacgcggcgaagctggcggcgctgacccaacgctgcggccttgatggggtggtgtgttcagcccaggaggctgtgcgctttaagcatgagctggggcaggcgtttaagctggtgaccccggggattcgtccgcagggcagcgacgctggcgatcagcggcgaattatgactcctgagcaggctcaggaagctggggtagactatatggtgattggtcgcccggttactcagtcggcggatccagccgcgacgctgcgggcgatcaacgattctctgcgcaagggggcataatgagcgattccaacagccgtctggtctactccaccgaaaccgggcgtatcgacgaggcgaaaccggcgccggtgcgcccgaaaggcgacggcattgtgcggattcagcgccagaccagcggccgcaagggcaaaggcgtctgtctgattagcgggattgatgccgacgatgctgcgctaaccgctctggcggcagagttgaaaaagaagtgcggctgcggcggcgcggtgaaagatggcgtgatcgagatccagggcgataagcgggatctactcaagtcgctgcttgaggcgaaagggatgaaggtcaagttagccggtggctgatcgctattttccctctgctccaatggtctggttgaaataacaaggccgcggtaaatgccgcggccttgaatgatttaacgtgcgtaagtcaattcgtgtgaattattcttttatttcgtcagataattaaattatttgccgacctggtgaccaataataccaccgactgctgcgccacccagggtaccgagcgcgctaccgtcagttaacaccgcaccaccgatagcgccggcgccagcgccgatagccgtgttacgatcgcgtttagacatgttagagcaagcgctcagagacattgctacagtgacagccagaacgacagcagccatttttttgctcgttgaagtcatcattttttttctcctgaataatctattcatggattacagcgctcctttaagcatagcctgataaagcagctttagggcaattccatgaagttaaggtgcgcaggtgtcacgaaaatcacgcaggtgatagtcacttcctgttatatcgctaataataattttactttttttaaaatttatcgtcaggtaaaaagtcttaattagcggctcggaatactctcagagcgataaagcgccccttccggcgctttggcagaagatggggcggcggaggatcagatgtagggcacgatatcgacggtcaggccgctgcggagcaattgttcgcgacaggcgtccggtaagcgatcgtcggtaataacgcgattaaagcggccggcgggaccgagcggatagggatgtaccgcgctgaattttgaactgtcgctaagaataattgcctcacaatgcttctccagcacggcgttcaccacgtccgcacgcatcatatcgcggccggtaaagccggtttccgcctgccaaccgtcgatcccgatgaaggctttgctgaaatgcacctgctggatgaactgacgggttagcggaccgaccatactctcactgcgtttctgataaattccgcccagcaggatcacctctcctggggtctctttcagcagatgggcgatatagctgctgacggtaatgatggtgatatcgccgcgctcggccagcgtacgcgccagcagggcattgctgctgccgttttcgataaataccgtttcaccggtattcactagcgccgcagcccggctggccagctcacgcttaatggcgaaatgggtcatcatgcgggtttcgacatcttcgctgtccagcggtacggcatagccatgagtacggcgcaaatagctctgcttttccagcaaattcaaatcctgacgaatagtaacctcagagacaccggtcatcttcgccagatcggcgacgctcatgcggcctttatcgatgaccacttgcaaaatactttgttgtcgggcgttcatagcaacatcactgttagggggctatatggcgagcaaccggtccatatggccggctgcggcatggctgatattcagatttcccagggcgccttgggttggttttgttgttcagcatcgtccgccgccagcgccagcagctccgctttgaggatctccagattatggatcgcagaatggtaatcaccggcaaccagaatatccagcacggtatcgatacgttgagcgagcaggtgggcattcacatctgacatggcattatcctggtaacaaaaacgaatgaaatcaatgatgctaaaaatgaatgaaaaagagaagcgaaaaaaacgcacaaccttaatcggtgcgacggaaatggctggatagagaggaaagaagcagcggttcccgcaggaaccgctgtgaaggggcgtcagaccgccggacgcgcaataatgctgcgggtttccatgcgaacttcagcgatagtgacatcgataacgtcagtcactttatagactacttcacctttgatctgcacggtaccgttctcctgactgcacaccagttcgtcgcgcacggcgtggaggaacggggccggaataaaggcgaccgcgccattgtccaccagacgcacgcgcatcccgccgcggctgacgtcgatgatctccgccgcgaagcgggtatcggtcccggctttatcgttgaggaaacgggcgtacagccagtcggcgacgtcgcgctcggccatccggttgagacgacggcgctccgccatctgcacggtggcttcatcctggggacgcgcaatggtctcgcctttaatgatggctttcagcagacggtggttgatcatgtcgccatacttacggatcggcgaggtccaggtggcataggcttcaagcccaagaccaaagtgcgggcccggctcggtgctgatttccgcaaacgactggaagcggcgaatgcggctgtcgaggaaaccggtcggctgagcgtccagttcccggcgcagcttgcagaacccttccagggtgagcacttccgtcgggtcgacgtgcacatcatgggttttcagcagggcggccaactgctcggtattcgccgggtcgaaaccggtatgaacgttataaacgccgaagccgagcttgtcgcgcagaacgcgggcggcacagatgttggcggcgatcatcgactcttcgacaatgcggttggcaatgcgacgcggttccgcgacgatatccagcacttcgcctttttcgccgagaacaaaacggtagtccggacggtctttgaacaccagcgcatgggtctgacgccattcgctacgacgctggcacacgtccttcagcagcgtaatttgctgcgcgatcgcctcgctgtccggctgccagctgccgcggccttccagccagtcagagacgtcgtcataggccagcttggctttcgattcgatggtggcggcaaagaactcgatattgtcttcgatggtgccatcggccgccagggtcatccggcaggccagcaccgggcgcacttcgttagcgcgcagggagcagaggtcgtccgacagctcgcgcggcagcattggaatgttgaagcctggcagatagttggtaaaggcgcgcacttttgcggcgttatccagcttgctgccttcggcaatccaggcggtcgggtcggcaatggcgaccgtcagcagcagtttgccatcagcagtggattcggcatacaacgcatcgtccatatcttcggtgctggcgctgtcaatggtgacgaagtcgagggcggttaggtcgcggcgcgtcagcccctcgtcgagcatctcggtggcgacgccgtccggtgcctctttctcaagattatggcgcgccagggttacccaccatgggacgaagtggtcgtcgctaaaagtgatgaactgggtcaactccgcgtaaaatccgcggtcgccttttaatggatgacggcgcatctcggcgacggcccagtcaccctgtttaaaatcgtgctcaacgccgcgggcggcgcggcagggaatggcgtctttcagcagcggatggtcaggaacgatagcgaggcgatcgtctttcttctggactttaccgacaaaacgagtcaggaagggctcaaccagcgattccggctcggcgctttcgcgttctttttcagaatggatcaccgcgacgatacggtcgccatgcatcacttttttcatctgcggcggcggaatgaagtagctcttctgagcgtccacttcgaggaagccaaagcccttttccgtgcccttaacgaccccttccgcgcgcggcgtctgggaatgcagttgctgtttaagctgcgctagcagcgggttatcctgaaacataattaggtattttcgtggctaaaagagcggctgacatttttacgcgaatatgcctgccgcagcaagcgctgtttcagcaatttacgtctgctgacgcacattgccgagggcgattttcagacgattcatccatccgcacagcccgctccagatcaacagatcgattgcttgttgctcagagagtcgatattccgcgaggggcgttaactgggcggcgctaaaccggtcaggcgagcgggttaacagctgcaccgcggtcacgagagaccgggcctgaggatgctgctggagccagtgatggagggcctggtcgccctcccgcagatggctggcgaactcctcttcaccctgccagtgggggagccaggcgtcaaaacaggtggggctgccattggtgcgcgccgtgagtaaggcgacctgcgggccaaaggtatcatccgtgctgagctggcggatcaaggtctccagaggcgcgaataactgtgggtcgcaggccagcagcggcgccagctcgcccagaccgggcagcgactgccagccggcgatgcgccgctgacgctcatcatcggcatactgcaggtcgggatccgcaatgtctgcctgccatgctcccggcggcggggcgaacagttccgcgggtgcctcctcttgctggggcataccggggatccagcgcaccggaaagccctgggccgcctgcaggacggcaatcgcccgcgcctggaagccgacgaatccgataatctggttgaacagaataatgtcccgactggttaagcccacttcgtccagctggctacgggagagagcgttaataaccgagggcgaaccggcaagctgacgagcatattgcgtgatttgcgccagacgacggttgctctcgcgcgaggaatcggggcctggcaggggagcaaggcgggcggcgtagtggttacacagccgctggacgccgtagacctgggcgacggtgagcgcggtgctgagtcgatcgtaagcggtaaaggtctgcaggcgactcaccgccacctggtcgggaaacagcagttcggccagctggcgtgcggggtgtagccagtcagcgtgggcacgtagccaggcggccggcagcgtcaggtccagcaaaaagcggtcttcaacatgggcggcttcagggacgagcggcaggacatccaccgggcagattgttgactgggtttcgtgataccagtgatttttgccattcacgcggcgtggctccatgggctttccttgttcggtatgtggcgaaccgccgttccgcggatcgtttatgcagaactatcctggcgtaacccggaagcaggagaaaatattgatacgtgctaacaaatagccgattggaataacaggtggggcgtaaggcgtgggggagggaagaaccctcctcaccggggcgaggaggggaaggaacttatttcagttccagctcgttcatggcggcgatattgaacccgccgtcaacgtgaacgacttcaccggagatccccgcagacaggttggagcacaggaaggctgcgctgttacccacatcttcaatggtgacggtgcgacggatcggggtgaccgcttcgcagtgcgccagcattttacggaaatctttaataccggacgcggccagcgtacggataggaccggcagagatggcattgacgcgaacgccttccggacccatggcgttagccatatagcggacgttagcttccagagaggctttggccagacccatcacgttatagttcgggatcgcgcgctctgcgcccaggtaggagagcgtcagcagagccgaacccgggttcagcatgccgcggcaggctttggccattgccacgaagctgtaagcgctgatgtcgtgcgcgattttaaagccgtcgcgagtgacaacgtcaacgtagtcgccgtctaactggtcagccggggcaaaaccgattgagtggacgaaaccatcgaattttggccagactttttccagctcggtgaacagcgcggtgatgctctcatcttcagcaacgtcgcacggcagcacaatgtcagaacccagcgcggcagcaaactcttctacgcgacctttcagtttctcattctgataggtgaatgccagttccgcgccttcgcggtgcattgcctgcgcgatgccgtaggcgatggacagtttgctggcgacgccagtgatcaaaatgcgcttaccggaaagaaaacccatagctttaatccttatcgttattgcttatttttactttaacaatcataacgttaacattgttatttcaaaataactcaaatttagccgggaattatatcccactgacgaccccttgtgtcacgatatttttcagccggtccgcgccgcgcggggcaaaagtacatcgcgatagctgcagtatatcatctctcctgacgattatttgagcgcgatctccgccagcagcaggcgtccattgctgcccacgggacgcagattccgcggggatccaccgcgccagcagaggccgctgccggccgcgcagcgccgcccggccagatcccactcgccttgtagaacataagcgaccccctcgctggcagggcattgcaggtcgctaacgacctgaactgtcgccgacgcgcgcccgcgctgagtcatgatattgaagtccagccctggcgcaacgatcccgacgctggacagcgcccattcgccggggaaagcccacggctgccagagcgccagcggttggtcgatattctcgccacacagccgtagcggctgccccgccagcagagtaatgacccggtcgacgccaggaaagggggagaaagggccatccgcctgcagggtggcaatactcgctcgccagagaaaaggggcatctggagcgggtacgcagatgatttcgcgcgtctctccgccgccgtttttccacggcgtgacggggagcgtcgaaagttgaaaagggaccatcatgggcagcataccttagttaatcgcttccggcgtcaacaataagcaccgccttgagctagtttagtaactttctgcaatacaaatattttacatattcgtcacaaaatgagagtgcatgcaaggcggtgagttgtcaatgcttgtatatacaagaacgattgagtgaggtgatattaataacttgagtgaggaacctatgtcttcgttttcgtctacagacgggcagtcaaagagcaattatgctggaatgagtgaaaggcggtcgattgattacatcccggaaagcgaacggcatggacacccttttagccagttcaccctttggtttggcggcaatctgcaaattacggcgattgtcactggcgctttagccgttgtgctgggcggcgatgtagtgtggtctctggtcgggcttctggtcggtcagatgctgggggcggcggtgatgtctctgcatgcgctgcagggaccgcgactgggacttccgcaaatgatccttagccgcgcccagtttggggtttttggcgcggtggtgccgctggtgctggtttgcgtcatgtatatcggtttttctgccagcggcaccgtattggccgggcaggcaatggccaaactactgaatatcagccacgtagccgggatgctgatattcagtgcgattattatcgttatcgccgtcctcggttataaggtgatccacaagctgggcaaactggcgagtatcgtcggaattctcgccttcgtttatatgttcatcacgctgctactttcggccgatctcagtgcgctcgcgcacaataaccatttttcgctgccgacgtttttattagccgtatcgctctcctcatcgtggcagatcgctttttgcccctatgtatccgactattcgcgctacctgccacgcgatgtttccgccacgaaaacgtggtgctcagtgtttttcggcaccgtattgggcacccaaacgtcgatgacgctcggggttctgacagcggccattgccggcagcgcgttccctggtcacgaggtgagctatctggtgggattaggtaagagtcaggcgatggccatggttatctatttcgccatctgttttggtaaaattaccttcactaccctcaatgcgtacggcagctttatgtcgctgaccaccattgtttccgccttccgccggcaaaccgtgctgtcgcaaaagtgtcgcattgcattcgtggtgctgatggtgacggcttcctgcattatcgcgttgcttagcgaacccgctttcttaaagcatttcacgcattttcttctgtttctgctggcgttcttcgtgccgtggagcgccatctgtctgacggattattatcttatctcgaagggcgccatcgatattccggcgctaagcgacccgcagcaacgctacgggttctggaacctgtacgcgatcaccctgtatatcgtcggtgtgcttatccagttgccgttcattgagaacccgttgttccatggttcgctcacgtggatcttcgccggtaacgatgtctcatggataataggctggtttggcaccggggttctttactacgcgctgcgccgctttgaccgccggtcgctgccggcgcagagtcttttcccttccacctgaatgacaagggcggcgtgagggccgcccctgccgttgcctgccagctatttcccgtctttgcgccaggcgtcggcggtgagggcttcaccgaagtggccggcgatcaggcgccgggtcaggtcgtgcagcggcgaggccagcacatcggcagtgctgccgcgctcgaccacttcgccgttatgcatcaccagcacctgatcgctgatgtgtttcatcattcccaggtgctgagtgacatagatataagagatgccctgtttctcctgcagctccagcatcaggttgataagctgggagcgcatcgacatatccagcgaggccagcgcctcatcgcagacgataaccttcgggcgcaggatcagcgccctggcgaggccgagacgctgcttctgaccgggcgccagcatatgggggtagtagctgacgtggtccggcagcagaccgaccatgcgcagggtgtcgattatctgcttctgccgcgcctcggcgtcgagatcggtattcagtcgcagcggaaaatcgaggatctgcgagatgcgctggcgcgggtttagcgaggtcgacggatcctgaaagatcatgcgaatcttctggctgcggtaggagtaatccccaaaagtcagcggatgatcgtcaatcagcagttcgccgctggtgggttccaccatgcccgccagcatcttcgcgagggtcgatttcccggagccgttctcgccgataatcgccagcgtctgccgttcgcgcagggtaaaactcagtggcttaaccgcctcaaccgtctgacggtgaaaccagccggtgcggtagcgaaaggtcttactgagttggcgaacttccagcaatgtttcgaccatttcactctttctccatgttcaacgggaaatgacaggcgtacagatggttgcgcgccccggtaagacgcggcgtttcgatacactcgcgctgggcgtacgggcagcgcggccccagccgacagccgataggcaactgctccagcagcgggatcgctccaggcagggtgttgaggcgacttttatgcggcatggcgctaccgaaatccgggatcgcgcggattaacgcctgggtgtaggggtgatgtgggagggtgatcagctcttcgctgggcccactctccaccgtctgcccgcagtacatgacgttgattttatccgcccatttgctgagcatttgcaggtcatggctgatcagcaagatggtggtgttgttgttctggttgagccgcgtcagcaggcgaataatctgcgcctgggtggtcggctccatggcgttggtcggctcgtcggcaatcagcagacgcggctggttggccagggcgatggcgatcatcaccttctggcactcgccctcggtcagctgataggggaagctgcgcatggcatctttgtgatctttaatgccgacgcggtgcaacagctcgatggcccggcgcttgcgccagcccagccgttgccaccagcggcccttgtaggtccagccggggatactctgaatcagctgctggccgatgcgctcagagggatcgaggcacgactggggctcctgaaaaatcatcgacacgttatggccgatcagcttccggcgctcgcggttcgacagtcgcagcaggtcgatgtcatcgaagcgcatgcggtcggccgtgacccgccagttgtctttggtcacgccgcagatagctttggcaataaggcttttcccggagccggattcccccaccaggccgcggatttcgccttcggtcagcgtcaggctgacgcgatcgacggcttttacccagccttcgctggttttaaattcaatggttaagtgacgaatatcgagtaacggcattattctaccccggcaatgatcgcccggcgaataccgtcgcccagcaggttgaccagcagtacgctgagcataatcgccgccccggggagcatcacggtccacggcgccacatagataagctccagcgcatcgcccagcatggctccccattccggcgaaggcagctgggcgccgagatcaagaaagcccagcgcggcaatatccagaatggccatcgacagggcgcgagtgatctcggtcaccaggccggaggcgatattgggcaggatggcgaacagcagaatattcagcgtcgaggcgccatcgaggcgggcggcgatgatgtactctttctccagctcatcgtggaccatgctgtagacggagcgcaccatgcgcggcagcagcgccagccagacggcgaacatcgcatggctcagatgcggcccggcaaaggcgacgacgataatcgccagcagcagcgaggggatggagagcagggtgtcgaggatatggttcatcaccgccgagcgcaggccgtgggtcgatccggcaatcacgcccagcaccagaccaaacagcgtggcgccgagggtgacgacaaaagcgccgccgacggtgggcgccgcgccgctcagcagtcggctcagcacatcgcggccgaggtcatcggttcccagaaagaaggagacttcgccatagcgcgaccacgacggcggcaacagctggtagccgaggaactgctggtcgatgccgtagggggcgaaccagccgccgaagacgcagagcagcagcaggcccgcgcagccgtacagaccgatcatcgccgtggtgtcgccatagaacttacgccatacggtgcgcagcgcgccgggcggacgcttttccagataaacgctatcgtagggcatatgaatccgttttaagtttgttagtcatgctttaagtcttttcaaaaatcccgctaataccaacaccttgccagcattgagtgctttaattttgtgtgttctgcattgatttgaaggttatcaatttaaccaaaatgtgtacactgatgtgtatatcatcttccggggtgtacacattgcttaccgacacaaaattaagaaaagctcttggcaaaaagagagaccagatcgaggtcatatcggacgctcatggtctgaatgtccggttgtctacttccggcagtataacattcttttaccgctacagatggaacgggaaagccgctcagctaacgattggcgattatcccaccacctccttatctcaagctcgcgaacgtagacagcagttcagggcttggttgacagaaggactcgatccgagacggcaaacagttctggagaaacagaaaaaagtcgaagcactcaccgttaaagaggctttcgattactgggaaaagtattactgcatccctgaaggtcttgtgaaaatcaaggttaaccggcgggacttcaataaccatatagcgcctgtgctggggaacatgattgttgatcagaccactaaagcgcactggcttaacctttttgatggcatggggcgaagagttgtcactggtcagatgcttgggctgatgcagcgtacgttccgtttttgctccaatcgaggggtcattaatgtgaacccaattgagagccttaggcgctctgacgtaggtctcacagcatccgtaaaagatcgcagattgagtgatgaggaaatcaaaacagtttggaacatccttcctgaaatgaagtacagacaacagctgataatgaagtttctcatcatgactggctgccggagtacggagatcaggacagcaagatgggagtggttcgatttccatgagcaaacgtggaccattccggcaagcgattataaaaccgggaaatcggtcagaagggcacttcccgaggcagtagtaagaatgatgttagcagagaaggaaacgtcagtttcaaaacacgttgtgacactgtcacgctacagagggccagaagatgacagaccgccacaacaaccaaacgtcgctctgttttctgctcagattatagctaaaacaggcatgaagccctggtctctccatgacctcagacgaacagtggcgacacgcctttctgaattaggtgcgccgccacatgttgtggaaaaactgcttggccatcatatggcaggtgtcatggcacgttataacctgcatgattatctggatgatcagcgtcactggcttgctgtttggcaggatcaccttgagaagctggttggtcagcctctggtttgatccccacgttatcctcccaggccagcaggtctgaaagtctccaccttttagggctgccatttattttaggctgcgggaatggctgagcaaagtaagagggcatccgggatggggtgctccagaaatagagtgtgctgcgcgatattttgtatctggacagaacgtcatcggttatcaaaatttcatctgatttatgagatgtattagtcataaaaaccccttagttacattgtccaggcagatggtgtagccgggtatcagctcaacggaagcggaggcgcactggttgccccagtggctccagcctggctctgcgctgcggctgaaaagctcaatccgcggcacgtcgccgtagagcagttccaggcggtggcgaacttcccacggtttctcgctgtgcgcgccgagcgggctgtagaccacctgcttaatgccggcgtgcttgcgctccagcccggcgccgcgggtggcgatcaacacgtcttcggtattggcgcgggtgtggttgccgccgttcatgcgcgtctcagcattcagcaggtcgaggaagtcgtaaaagtcggcgacgtcaccctctgccagggccttggtaatgcgtagctcggccagctggttcagcttcacccaagtgaatagcttcatcgtgcgcaccgtaaatccccaggcctcggccagctcgatcgcctcctggttgtgggtgccggtgtaccacatcgccagcacagcgttatccgcggagagctcccacaccgggagccgcttcatatcgagcaagctcatggtggggtagtgatcgacggcggcgccgttgcttatcgtgttcccgtaagaccaggccgggtcagcatagataagtgagtagcggttcataggactgactccatttcatcgaaatagagtccagatgcgataagccggcggcgccgggccgctttatcaatacatttctggcggttgccagaggcggcctgagctatcgagcgcttagtgaacaggcgcgttttaccctgcggggtaatgacctttggccttgtgatcaggtcaaaggtgcgatcgcatatgccatcctcgttgagccaggtttccgatgcgatcagctgtgcaatgcggccttctcccttggttatgccgttcgcaacgcggttaaattcgacaagcgtcacgccgaatttctccgctatttcgctgccggtaacggggcggccgcgcgtctgaatcatccagatcacgcgctcgcgaaggccggagaatttccctgctttgccgggcctgcggtaaaatggagtgcgtttcatttccactgctccccgaagatgaacccgatctcagccagcgattcatccatcttgctgatgaactccggcaccatttcgttgaagtcggacatgtatttgtcgtcgcgctcaacaaccacgtggtgaatgccttctcgcttcatgcgagggtcataattcgcgaagtaccaggcatccttaccggttacccacatgctgaattgcacctgggccatgtaggcggatttgatagcctcgaagccgccaagcctgaatttcatgaagtcgcgagaggtgaaagggcacttcagctcaaggccgcggccatcactgcacaggccgtctggtgagcaggcggtgcgcataccttcgtcacggaaaaggatcggtgactccgttaccttcacgtcggtggtgaactcaaaaagagtgcgagcgtcggcctcatactgtttcccccaggccagcgccttggcgttaacttccggcgccgcgccggtgcaaacctctgcgagcagcgtgtggaaataagacattttcatgtcagtccacttggtgcctgatctcggcttcgaaatgacgttatggacttccgaggcggtgatcacgcccaggcgtaagcggtgccaggattcatctccctgttcaacgcgggtaacgtcaatgccagttcgatcgaggataatttctggtgtcatgtcagcagtccttatggtcatcccatggcccaaatccacctacataaacaaaaccgctagatgaatcgcgcccatgtttatcgcgctgaagtcgctcaatagaatttctgtcaatggccgcctgacgcatctctaatgattgatggcctctacgacggccatattgcttccaataagctgcgcatgacttactgcaaaactgcgcccagcctctttttctgtcagcaactcgggcaaggaatttgtccgggcagcacttgcaggtcacttcaacagtttttccggtcatgctgccacctgcgcttttttctggaggaagctaaagcctttctgcgcttcttcttcggtgagctgtgatgcctggaaaatgtcacgcttgaagatgttgctgcacagaggcaggaagtcctgctcccagtccttattcagggacgtcaggaggtcagtaattgcctgcaacgtttccccactggccaccagggggagagcctctgtcgtgttgcgcggcgtaacgtcacgcatatccacttccagcgttttaccttccatctcttcggcagtgggctgctggccaatttcaggccacgccttacgcagagcctgggcctcggcacacttcgccagctggccgtaagggcgctttttccacattgcgtttggcgcggtagtgtcgcggccggcggtggcatagttctcaacccagtattctttcgcgctgaattcgacgatttccccgcttggcatgcgcttgctgaccgtgtacttgcaccattgaggtacggtcacttcaataccggtaagcgtcagagtgacgtccgggccgaactctggttcttttgcgccagcgtaatcaccggagcgatcggcctgaatccgataaagcccgatgcctggcataaccacatcgcgccactcgcttttacccgacttcgagtccttaacgctcattggcaccagatgaacgggcttcagaagcggatctaggtttctggcccggcagtagtccagcgccatcattaccgattcgtctttggcgccagggtaaatactgtttttgagggcgctccaggtagcgctgtcaatgcctcgctcagcaagagagctggctgtaatcacaagttcgttagccattgctattccccaaagttaaaacgggcagccggtgcggtgatcccagtcgtattccgcctgggcgtaagctactgccgagatgagatcgttatatgcctcgccagctgcatcgctgcggaggccttcatatgggcttttgtccatcggcacagagaagcggaacagccctgacggctctttcggcagcgagtcgataatttcctgcgcccgatcgtcaatccacttttgcttctcttcggtgagcgactgttcagcccatttccgttcttcgatagcgtcatatgcgcggtatgcgttcatagctcgctcctgaaatttggttgtaagaatcccggcaccgtaatggctgcctgatagctcagttaaattcgtgcgctgatatgcgtggttaatgcgtcccggctggaaccaggttcggctcgatattgcgtgatgcgtatggccggcggatgtggcgcagattgccctgcggctcatgccagtagctgccgtcgcgatagtcgaagctgaccagccaggcggctccggtgcggcgattgcgcatcatcacggcgcgtccgttgttaggaattgagttagccattgaacacccccgtaacgtgcagaattttgataatcaacgctgtccagataacgccgcagatcagcaggcagtaaatcagtgaacgaatgccttgtttgctcatttgccaccccagcacggatagctaactgcgataacagcaaccaaaaacggaacgacctttaaccaaaaattacgccatgcaggcttgtcttctttgcggatcatctcttcacctttgccttaaagccggccagctgagcgttgttacgattacccggcgttgccggtgttgtttggatgagatgataatagcaatgagtattaaccatagcaatacgtattgatattaattgatagcaatggctattaaaccattgatagctaaatgaatttattttttgctattgtgctgttgtgctcaaaaaaacatcagcaagggtggcggcatgtcaaatgaggatgagtttttcacagagatgcatcagcagatagcgcaggtcatcgggatagcggttatgcagctgctggttgagaagcgcgagccctcaagagaggcgctgatagagatgattcaggtgttgtggcagggtgagcaggtagatctggcggtagagctggcactggatgtgttgatgccgcgggaagagtagggcagtaaaaacccggcgcgggggccgggttgtggattgtaaatagataatgattgttggttacaatatcaagttaactaatcagatacaggagacaacaccatttacatcagcttctaaagcatcaatttgagctttatttgcttgtgttgccataccataaatagtgtaacttttgtgttgaagattgcttaatgggcagccttcatgattaatgattgcggcaagagtgttgccatctttaacgtgcttaacgcgatcatcaatgctttcatcagtaaataaatgagggtgtgtttttaataattcagatgtgattctttttatttcttcagcgtgcgacttgaatgcttttgcagcgtcgctttcgttggttcgagatcggttttggacgaatagatgtagcttggggaattctattttactttgttttgcttccttgttgaaatcaaggaacatttcgtcttgttcagtgctatcaatagaaactccataaatcaatttaactaagtttttgataccacgaattgaggcagcatcggctgtacatggaataattactcgatttgatgcgacaactccaagttctgtgtagcttgcaaaactagggttgcagtcaataaaaaacgttttaggcctctcggaaatagttttatctgcctcaaatgaagcgatgaggtctatcaaaagtgatcgactttttttccaagcttctttaaccggtgaggatccaatatgcgcaataagccttgaacaaatatctaagtctacgtcacctggtaaaagataaagattgtttggcatttttggatttacagaatgagccttaacaaaatatgaagactcattccccaggcgtgcaagtggagagttgctaaagcgctctttaatgtaaccagctatagtagtatttctatcacggaggttgttaagattttcttctccaactccattgccgcccaaaataatctcagaaacatttgattgagggcaggcatctataacgactacatcttcatccgaatgcgctattgcatactcgacagcaagattataggtcaaaaacgttttcccaacgccgcctttattgttccagatcaaatatttcttatttgtatctaccatatcgttcgcaacttccgccagttccgacttcataatttaatcctaagtttaccgtgtgtaatgaaaaaagcgaccagaaaattatccggtcatcatagacttacaaaaagatattaataatcattgcgttggagatgattcattccctcaatacatcaaatcaaccttctgcactgatttattcaaagtcattccgctcctcccttcgcttgaagaataccttctccaacctgagcgctatcccaactagtccgataatcagcaaagtaatgagtattgggataatcagatcagacatgcttcctctgcgtgctaaggctttacccatgcttcctgtacgtctgcggcatgctgcctatcaccttgccgaacacgaacacccgattcatctcgtctttctcgatcgggtcccatgctgcatagctcttgttgtctgagataaccagcagcttgtccttcatcttctgaaggcgcttcacgtgagcagtgtcgtcgtacaggaacgcatatatcccgtcgccgtcaaagctcttaacgctgatgtccacgaacagcagatcgccaggctcgatcgtcccagacatgctgtctccgcggacgttaatgatacggatgctctcagccttgcgtccatcgaacatgtggcgcgcttccgccggtgcatattctacggagcggaggatctccacgaactcctggttcacgatgcccggaccggcactaaccataaggtccagcacatcaatcctgaatgcatcagtatcctgacttttaacctgggcagcacgaggaagctggccatcatcgcgcatcggtccattgccggttgataaccattcagacctgacgcctaaagcattagctatctcgacaatttttgttgatcccctggcgtttccgcttacaaggcgccaaatggtcggctgagcaatacctgaggccttagcaagcgccccctgggacattccagccaaattcatggcttcgtttagacgatctgcaagagtttcttttttcataatttcaaatttatacgcttgcgtattactggtcaaaacacgttttgctattgctaaagccaatacgcattgctattatcactttgcaccaatacttataggaattggaacatgacgaacaaaaccatccagaaggcaattgatatcgctggaagtcagaaaaaattggccgatctgtgtggcgtagcacagccgacagtttggcgctggctgcatggcggcggaatagatgcccgctatgtgatgaaaatcgtgtctgcgactaacggcaagattaaggcggcagagatccggcctgaccttgcacagttgctaagtgcgcattcaccggccgcctaaccagcggccattccaaacaacaccagaggaagtatcgcaaatggagagttcaacgacacgcaacaaagtggaggctcgcaggatagaaagctggttacacagccagatagctgaactgggaaccacgaatatcgccaaagtggccggagtgaataagtcgacggtgagtcgctggcgggaaagtctgctgccgaacatgtcgctgctgctggccatcctgatttctaacaggccgggagagaaaggtgattttgaagcatgagtgggaacagaaaggcgaaagccgcggtggtaggacaccaacggctttctacgcgaattaactggatcaattcacaggagtaattatggcaaatactgccgaagtaatcaatttccctgtgcctgtcgtggcactacaggagctgcgcgtggcagatctcgacgatgggtttacgcgcatcgccaatgagctccttgaagctgtcatgcatgcgggtttgtcgcagcatcagcttttggtgttcatggctgtcatgcgcaaaacatacggcttcaacaagaaatctgactgggttagtaacgagcagatctccgtgctgaccggcattcttccgcataagtgttcagctgcaaaaagcgctctggttaagcgtgggatattaacccaaaccggtcgcgtaatcgggattaataaagcggtcagcgaatggtcatctttacccataaaaggtacagaaaagaaaccttacctgaaaaaggtaacattacccgaatcaggtaagaaaagtttacccgaatcaggtaacgcctattacccgaatcaggtaaacacaaaagacaaacatacaaaagacaataaagacaatattaataacccccctaaatccccccgggcggtttcgttcgatgcgtcagctgttcagttgcctgactggctttctgcagaaatctggtcgtcatgggtggcataccgtcgcgacctgaaaaagccgatcaagtctcagcagaccgtcacccaggctatcaacctgctggaccgttgccggctgaacggttactcccctgacgaaattattaaccagagcatcgctaatggctggcagggactttttgagccgaaagttgccaaggcgcagcgccggcaggagtcccgcgtcactgagcggttcgctgacaaagactacggcaaaaccgaaattccgaactggatgagggatcagcaatgaacctggacgaaagaatcaccctggtcgaaaaacagctgcaggagctgtcacagccagcgctggacatcccaaacaccgaagtcattaagcagttagtggtctgcgaaaagcacggcgactatgagcaacgccagcgcgtatcaactggccttgtccgtctgccaggtgcgccgacaagctgcccgggatgcctgaaagatgagctcgttttcctgcgaaacgagaaggccaaaacggatgacagaactcgcactgcgaatgttgaacgcctgatgctggagctcaaggtcccggcccggtttgaagcctgcacgctggataactacctgccggtgagcgaagacgcggagtttgcgctgaaagtctgccgagcgtatgccacccgctggccagatcgacggaagaacggcggcggcctggttatgtgcggcaaacccggcacgggaaaaaaccacctggcttatgcaattgcgaaaagcgttatcgcagaacaccagagcccggttgtgttcaccaccgcgctgaaaatcgcccgggagtttaaatccacttggtcaaagacggcgacccgctccgaggaagacgtgatccgcttcttcaccaagccggacctgctgattatcgacgaggtaggcattcagttcggcagcaaagccgaggagatgatcatgtttgaaatcatcaacacccgctacgagcgcctgaaaccgacgatcctgatcagcaacctgccgaaggatgagctgacgcagtttatcggcgagcgcgtcatcgaccgcatgaacgacggcggaggctgcacgatttcgtttacctgggacagctatcgggagaaccggtcatgaaaaagaactctggcaaacaagccgttattaacttcatcggccagcaccctggctgcagctttcaggatatccgccgcggtaccgggcttgactcttcagtggtcaattcctccctgtggcagatgcaccgtgacggccaggttaagcgtgagggagagtgcaggagctatcgctacaccctgatcgacacgacagccgtaaccgaaagcgatccatctgttcagtatcgccagcgtcctggaggcgtaaacccaatgaccaacctgtttaaccagtgcctggcgggagtaaggaaatgaacatctcaacaattaacgagctcatcacctgctcggcgaacgggtgcggaacgtgatggcggatactgacaacgagcatgatttaactgtcgacttcgctcgtaatatcctcctgcaaatcggctgtaaacctgtgcagattgttaagcgagtttattcagaagctgagtttgaacgccgtcgtcagtcactgatgaagcgcttgccaaagaaacagacaattcgaatgggtgcatatcgtggcgtaatcatgtcatcactggccaggccagaaacaaaatttggacaggcctggctttgaacagctgagcgcaccggagtacaaggtgcgcctgatggacagccggaaaattctttaggataaagaagagatcaaagagacgttgggtcggtcgccgaacaacgctgatgcttatgtgctgacctatgcttacccgatgatgaagaaacagttcaacacgacggggctgcagcaggggcgcgtcataactgtttacgccccttacttttagtgagaatttctaaatttctgctcgtgatctagccctttgcttactagttcctttatatcgctttttaacatgaaatacccttcattgctcctacctctggtagggtcatcagattcaacataactaaaaatctgagtggttttttcttctaattccttaaatatttttctgtaattttcgcactcaactttatacatatcaagcattaccatgttgctgaagtaaaatgcatatttttgatttgtttcatcaagtttgctattaatcagagattcctttgtggttaaaaggttttctaattctatatttctatttattattcgctcaattctctggacgctttccctttctggtgcgactttttcttggagtaaggttatttcttcaacaactccttttcttctcttttcttgctcgcttaaaatcgtttccatactttgcttctgcttttcaagttgagcgacttcagtttttagcgtggcatgctgggtttgcaattctttaatgttatattttgactctgctgctctttctgctgttgagaattttgtctcctctgttttcgatctttcaactgctctgagcccctcatttttttcaaactctgtaattatagcaccctgaagctggagtctcttaacctccttttcagaatctactttctcaatgcggaaagaaatacccttatgaattagtgtaagaacccaagagaaaacagggtagctaagggtgaaaaatattgagaaaaataaaggaaaccataagctatgtgtgtggggtatgctaaaagacgtaaatggtataagggtattgtcagggattgatttttttataaattctattttctttaaaacatcatcatccgaaagtagcatgtaagcaattttattccagttccagtaaacccaggatataatcaaacttccaaaaaatggattttttgccctatatacaaaagcctcttggactggtgtaattattgcatctttaactgatgaaacaacatccttcaacgattcgctcattatgtgtaaccagattggtaattgttgttaaccaataataaccaactgtagttgttaggaatagtccaaacgagcaaaaaaatgctcggacgagcctggagaaacagggatgatggaaagtgccgcccttggctgggtgtcacagattttacagcataaagtcatcgcaatggcgtcctgctgtaaaagggcgatggtcagaaagggaacaactgccaccgccaaacatgcactggaacgaccgggagaagagcatcaagttaccccgcgcatccgatccgcgctatctggaaatggcagagcagaacgccaagaaatagcgattttctcgtatatgctcattttgcttttatccccgggaagggcgataattaatttgtcagcctgagcaactgacacgattatctggcgccaagtggggacacatggcgcacaaaaccgtacagcaattcctatcaccgatggcgaaagccaccggcgattttctgtattcagcgtttgacctctgcggaggtgaagcgtgaagcaacaattctgccttatcaacgaccacgttaagcgtaacgtcgtcaacttcatccagtctctgcctgtagaccaccgatcgccgctgattatcgaggcgcgcgaagaaagccgcaccgacaaacagaatcgtctcatgtggccacttttgaaagacctgagcgatcaggtgatctggcacggtgaaaagctggagccagcggagtggaaagacctcattaccgtactggtcagccagatgcaaaacccggagcgtaagcagaaatccgcccctggcatcaacggcggcctcgtctacttcggcgttcgcacctctcaatccagcaagcgctacatggtcgaggtaatcgaggcgatctactggttcggcaccgagcacaatgtgaagtttagcgagaagtccagcagtcggattgcgtgggcccaggaatggagggcttcgcatgcacagtctgctcgctaaggtcatggagcgcggtattttccgcgtgccagcgcgccgcaagcgcaaggtagaagtaaagccttccgatatccccacctttcactatacggctcacctggcagatgtccgctggttgcgccgcgctgccagaaggaaaatcgcatgagcctttaccgaagcattaatggagctatctggcgcaacatctgggttgttggcgatctgcatggttgccatacgctgctgatgaacgagctggaaagggtcagttttgacccattgtgtgacctactgatctcggtaggtgaccttatcgatcgcggtgcggaaaacgtcgaatgccttgagctaatcgcaatgccctggtttatggctgtaagagggaaccatgagcagatgatgctcgacggactatcctcttccggaaacgtgtatcactggctcgctaacggtggcggatggttctttaaccttgactacgacaaagaacgcctggctatcgcgttggcccatttagttgcaggtttgccactcatcatcgaggtaatgaccgagggtaagagggtggtggtctgccatgctgattaccctcataacgaatatgcgtatgacaagcccgtcgatgcagaacaggtgatctggaatcgtgagagagtgagcgcggctcaggatgggatagtgaatgaaatatccggtgccgacctgtttatttttgggcacaccccggcacatcagccaatccagtacgccaatcagatgtatatcgataccggggctgtattctgcggccgtctgaccttggtgcagatccagggtggtgatcatgcgtaaaccagcacgtcgtaaatgcgcccactgccgcgaatggttccatcctgcccgggaagggcaggtggtatgcagttttgaatgcgccagcgagatcggcaaaaaacagacagcaaaagcccgggaagcagcgaaggccagagcggtgaagcgccagcgcgaattcgagaaggaggggcgccaacgtcgccgagctaagcgtgagtcattcaagacaaaggctcaatgggataaagaggctcagtcagcctttaaccggtacattcgcattcgtgatgaaggtaagccctgcgtcagctgcggaaacccgcttatcggcaagagcaactacctgaccggcagcgctattgatgccagtcattaccgttcccgtggcgcggcgtcgcacctgaaattcaacgtgttcaatgtccattccgcatgcacccgctgcaatcggcagttgagcggcaacgccgttgaataccgcattcacctgattgaacgcattggcctggatcgcgttgagcgccttgaggctgataacgagctgcgccggttcgatattccatacctgcagcgtatcaaatccatattcacccgcagagcccgcgcactggagaagcgccgcgcccgccatcaggaggccgcatgagccgtgacgttatcgaacgcatccgcgaacgctggcaaaaacttcgcctctgccggcaccgcggcaccgtactggttgactaccgcatactgagaaactttgtccgcatctatcagaccctgggagagacagcatgattaatacccaatacctccagtatgttcgccagcagctgatagtggccaccgccgatctgagcggtgcgacgaaagggcaactggtagcctttgcagaaaacgcgcaattcaccgctacggcgcgcagccggggaaggaagaaggtttatagcgaagtaaagcaaaaaatggttaacccggatgggccgccgatgagcggcagccagtcccgcgctaagggttcatcaatcgctctcgttctgcccgttgaatattcgacggcaagttggcgacgggctctgctgtcgctggaagaccaccagaaagcgtggctgctgtggaactacagcgataatatccgctgggaacaccaggagacgatcacccggtgggcatgggggcaattcaacgaaaagctggccggcgtgcgcattgcaaagaaaacagtcgatcgcctgcgccaacttatctggctggccgcgcaggatgtcaaagccgagctggcagggcgggaggcgtatgaatatcaggcgctggcggagctggttggtgtagcaaagtccacatggacagaaacctacctccctcattggctggcgctgcgcagcagttttgtgaagcttgatagcgacgctctcatatcggtaacgcgatcacgttcacaacaaaaggcgacaaatttagatgtaagtcttgcaaaaccgaactgaaaggcatatatttcatgtaaatctgatatcgtcgccatagcttcgattgtcgacacaaagaattcaagcccgaggttaacgccttgggctttttgctttccggcgacacgacaggggtattcgcgagatgcattgcatcagtacccctgtcacatcgtcgtagagcattgaaacgagtttcatcagatgttaaatttttggtgtggtgaatccccctatgcggaggggcattgccagtctgatatgtttttttgcgcattgcgagtcgtctgtggactggcggcgacttaccgggaggcacccggcaccacacctaataaaaaatgatgatagctgtaaggcccacttcggtgggctttttctttgggcaaaaaaaagcccgcatggtttcatgcaggcaaggcagttacatttagattttgtcccggtatatgttttttgtccggaagtcgaaagatactgtctcgaatacattttgtaaataacggattcaaatcacaaggccatgcatttgcatggcttttttattatcaggtcccgcggaaatcatcaccgacatgcttcgttgttaaatccagcctgacgggcctgaccttctcacacacagcttcccgatctttcatcggaggcggtaactatggctaagcgtatgcaagacaaagagagcattgccgggatgtcctggctggttctgctgatcattgcttgctggggtggacttgtccgctacctgatagatgtgaagcagagcaaggcaacatggagcttgatcaatgctcttgcccaaatggtggtttcagggtttaccggcgttattgctggcctggtgagcattgaaagcggactgagcatttacatgattctggcaaccgcggggataatcggcgcgatgggctccgtagcgctcacgtatttctgggaacgaatcaccggagtgaaagcacaatgacagcagaccagattatcgaggggatcctcggcaaggaggatggttatgtcgatcatccgtcggataaaggcgggccgacccgctggggcatcacgcagaccaccgcccgtgcacatggctacaccggtgatatgcggaacctgcccagggaaacagcaaagcaaatcctgctgagcgattactggaccggcccccggtttgaccaggtggcagctctatctacgttactggcagatgagctttgcgacactggcgtgaacatggggccatctgtagccagtaagtttttccagcgctggctgaccgcaatgaatatgcgcggaaagctgtatcccgatctgattccggatggcgccattggtccccgaaccatcaccgcgcttaagggatacctttccgcccgcgggaaagagggtgaacaggttctggtgcgtgcgctgaactgcagccagggtgccagatacctcgaactggcggagggccgcgaagccaacgaggattttctctacggctgggttaaggagcgtgtcctgtgaagatgatcattttcgctttgcttgtgctggtggctgtgctcgttctgttacttctgcgcaaatatacccggctggagttcgtagggcatgccagcttgctgctgaaaaggcactgttgcaaatagtcggtggtgataaacttatcatccccttttgctgatggagctgcacatgaacccattcaaaggccggcattttcagcgtgacatcattctgtgggccgtacgctggtactgcaaatacggcatcagttaccgtgagctgcaggagatgctggctgaacgcggagtgaatgtcgatcactccacgatttaccgctgggttcagcgttatgcgcctgaaatggaaaaacggctgcgctggtactggcgtaacccttccgatctttgcccgtggcacatggatgaaacctacgtgaaggtcaatggccgctgggcgtatctgtaccgggccgtcgacagccggggccgcactgtcgatttttatctctcctcccgtcgtaacagcaaagctgcataccggtttctgggtaaaatcctcaacaacgtgaagaagtggcagatcccgcgattcatcaacacggataaagcgcccgcctatggtcgcgcgcttgctctgctcaaacgcgaaggccggtgcccgtctgacgttgaacaccgacagattaagtaccggaacaacgtgattgaatgcgatcatggcaaactgaaacggataatcggcgccacgctgggatttaaatccatgaagacggcttacgccaccatcaaaggtattgaggtgatgcgtgcactacgcaaaggccaggcctcagcattttattatggtgatcccctgggcgaaatgcgcctggtaagcagagtttttgaaatgtaaggcctttgaataagacaaaaggctgcctcatcgctaactttgcaacagtgcctgaaggcgcgctgaaaggtctggtcatacatgtgatggcgacgcacgacaccgctccgtggatcggtcgaatgcgtgtgctgcgcaaaaacccagaaccacggccaggaatgcccggcgcgcggatacttccgctcaagggcgtcgggaagcgcaacgccgctgcggccctcggcctggtccttcagccaccatgcccgtgcacgcgacagctgctcgcgcaggctgggtgccaagctctcgggtaacatcaaggcccgatccttggagcccttgccctcccgcacgatgatcgtgccgtgatcgaaatccagatccttgacccgcagttgcaaaccctcactgatccgcatgcccgttccatacagaagctgggcgaacaaacgatgctcgccttccagaaaaccgaggatgcgaaccacttcatccggggtcagcaccaccggcaagcgccgcgacggccgaggtcttccgatctcctgaagccagggcagatccgtgcacagcaccttgccgtagaagaacagcaaggccgccaatgcctgacgatgcgtggagaccgaaaccttgcgctcgttcgccagccaggacagaaatgcctcgacttcgctgctgcccaaggttgccgggtgacgcacaccgtggaaacggatgaaggcacgaacccagtggacataagcctgttcggttcgtaaactgtaatgcaagtagcgtatgcgctcacgcaactggtccagaaccttgaccgaacgcagcggtggtaacggcgcagtggcggttttcatggcttgttatgactgtttttttgtacagtctatgcctcgggcatccaagcagcaagcgcgttacgccgtgggtcgatgtttgatgttatggagcagcaacgatgttacgcagcagggcagtcgccctaaaacaaagttagacatcatgagggtagcggtgaccatcgaaatttcgaaccaactatcagaggtgctaagcgtcattgagcgccatctggaatcaacgttgctggccgtgcatttgtacggctccgcagtggatggcggcctgaagccatacagcgatattgatttgttggttactgtggccgtaaagcttgatgaaacgacgcggcgagcattgctcaatgaccttatggaggcttcggctttccctggcgagagcgagacgctccgcgctatagaagtcacccttgtcgtgcatgacgacatcatcccgtggcgttatccggctaagcgcgagctgcaatttggagaatggcagcgcaatgacattcttgcgggtatcttcgagccagccatgatcgacattgatctagctatcctgcttacaaaagcaagagaacatagcgttgccttggtaggtccggcagcggaggaattctttgacccggttcctgaacaggatctattcgaggcgctgagggaaaccttgaagctatggaactcgcagcccgactgggccggcgatgagcgaaatgtagtgcttacgttgtcccgcatttggtacagcgcaataaccggcaaaatcgcgccgaaggatgtcgctgccgactgggcaataaaacgcctacctgcccagtatcagcccgtcttacttgaagctaagcaagcttatctgggacaaaaagaagatcacttggcctcacgcgcagatcacttggaagaatttattcgctttgtgaaaggcgagatcatcaagtcagttggtaaatgatgtctaacaattcgttcaagccgaccgcgctacgcgcggcggcttaactccggcgttagatgcactaagcacataattgctcacagccaaactatcaggtcaagtctgcttttattatttttaagcgtgcataataagccctacacaaattgggagatatatcatgaaaggctggctttttcttgttatcgcaatagttggcgaagtaatcgcaacatccgcattaaaatctagcgagggctttactaagcttgccccttccgccgttgtcataatcggttatggcatcgcattttattttctttctctggttctgaaatccatccctgtcggtgttgcttatgcagtctggtcgggactcggcgtcgtcataattacagccattgcctggttgcttcatgggcaaaagcttgatgcgtggggctttgtaggtatggggctcataattgctgcctttttgctcgcccgatccccatcgtggaagtcgctgcggaggccgacgccatggtgacggtgttcggcattctgaatctcaccgaggactccttcttcgatgagagccggcggctagaccccgccggcgctgtcaccgcggcgatcgaaatgctgcgagtcggatcagacgtcgtggatgtcggaccggccgccagccatccggacgcgaggcctgtatcgccggccgatgagatcagacgtattgcgccgctcttagacgccctgtccgatcagatgcaccgtgtttcaatcgacagcttccaaccggaaacccagcgctatgcgctcaagcgcggcgtgggctacctgaacgatatccaaggatttcctgaccctgcgctctatcccgatattgctgaggcggactgcaggctggtggttatgcactcagcgcagcgggatggcatcgccacccgcaccggtcaccttcgacccgaagacgcgctcgacgagattgtgcggttcttcgaggcgcgggtttccgccttgcgacggagcggggtcgctgccgaccggctcatcctcgatccggggatgggatttttcttgagccccgcaccggaaacatggcactgttgcaaatagtcggtggtgataaacttatcatccccttttgctgatggagctgcacatgaacccattcaaaggccggcattttcagcgtgacatcattctgtgggccgtacgctggtactgcaaatacggcatcagttaccgtgagctgcaggagatgctggctgaacgcggagtgaatgtcgatcactccacgatttaccgctgggttcagcgttatgcgcctgaaatggaaaaacggctgcgctggtactggcgtaacccttccgatctttgcccgtggcacatggatgaaacctacgtgaaggtcaatggccgctgggcgtatctgtaccgggccgtcgacagccggggccgcactgtcgatttttatctctcctcccgtcgtaacagcaaagctgcataccggtttctgggtaaaatcctcaacaacgtgaagaagtggcagatcccgcgattcatcaacacggataaagcgcccgcctatggtcgcgcgcttgctctgctcaaacgcgaaggccggtgcccgtctgacgttgaacaccgacagattaagtaccggaacaacgtgattgaatgcgatcatggcaaactgaaacggataatcggcgccacgctgggatttaaatccatgaagacggcttacgccaccatcaaaggtattgaggtgatgcgtgcactacgcaaaggccaggcctcagcattttattatggtgatcccctgggcgaaatgcgcctggtaagcagagtttttgaaatgtaaggcctttgaataagacaaaaggctgcctcatcgctaactttgcaacagtgccatatggccagcgggaagaatgcccggcggccagggttaaagcgagcgctgcggcggctccgcccgggcgatgtgctggtggtctggaaacttgaccggctgggccgcagcgtgcgcgatctgattacgctcgtgtcggagctgcaggcgcgcggggtgaattttcgcagcctgaccgacagcattgataccagtaccccagcaggccgctttttcttccacgtcatgagcgccctggcggaaatggagcgcgagttaatagtggagcgtacccgagccggattagccgctgctagggagcaggggagagtcggcggccgccgccgggtaatgactgaagaagtggtggagcggtgccgccgaatgctggagaacggcgctacccggcagcaggtagccgatgtgataggtgtagacgtgaaaacaatctacaagtacctcccggcgacttgaagacaaagatttcactacttttcctgatatgttacgtttggcttaatcaattcattcagctttgaaaacagtttggtttgttcgtgaacggtaagaaaacaataagttttgagcaatttttaactattaacagcagtcttgtttccatctcagatacatgggctgacttgtgggcgttaatttttcacacgggtttaagcgctggaaggctgctgagtattcgatatgatgatattgatggtgacttgatactgatacgaaaacagggtcacctgaaggagctacgtgttaaatcaacccctccagtggaggcgatgattgctcgtagaagagaacgctatccagaagatgtttatttatttcagagtcattctaaccgtgtgaagtaccatcgccggccggtcactataattgctttcaacgccgctttacgtcgcgccgctagatcattaccagacgttaacgtaagcagtagtagcgcgagaaacataccggactaaccgcctgtccagtcgcgtgtggccgatgtgacaggcgtgggggtgaagactatttacaaatatttgccagtacaatacggcgataaaaaatccccttgagcaggcacactcaaggggaaaatactacataacatcattgctgtgtgcgtctttgcgctcgtctatcttccaagaagatgcctaaagcttccagatatttctggtctgagcagttaaaacattggtttggtagccgatgtgataggggtgggagtgaagacgatttataaatattttccagccggttaagtttgctcacctgcgaaccgtatgcaagagatcgcaggtgagcaattcgctatgagggcattgccatagctgaaaaattttaacctcgcattgttcgcaaaaccatcaaacagctaaggcctaaaaacactttaagacttaccttactcgttacatcaatgtgttacggcaatgacataaattgatagccagaacctatattgatctgtcgctctgttaaaactactgtatatatattcagtgtgcgccgggagaccggttagagatcaaggggtgaaagtccccgaccattgaaggaccagcaatccacaaggtccccgagtcatgcgttgcataccgcgaggtatggggcgaagcgttgacaggggtgttgacaggccagccattgagccacgaaatgtatattaaattaccgggtgccgacgttgtactgttaacggaaggcaacatcatagggtgcgatactgcgagtgccacatggacccggcggggtctgagaccctggcatgtcaatacgatctctacgcgggaaccgggagatctcccctctgaccatctgccagtgtcggagatggcccgcaccgggaagacgaggagtcatagccggtgatgtacggagaggagaagtcggactcgctcatagtagcggcgaagcaggcgaacaacccgaaaggagcggagtcagtggagcgaaggagcggggccaaggggaacgcggaacagccacacatgcgccggacacagagccgggaaagcatgtcacagaggctgtcacgcgtgcgggaagctgcgaagcagcggaagaaagaacggtttacagcattgttccacctgctgacagtcgaagcactggaagccgcattcctctccctgagcaggaaagcggccgccggagtggatggcatcaggtggatggactacgccggaaacatgaagaacaacataacagatctgcaccggaggctacatcagggcagctacagggcgcagcccggcaggcgtcactacatcccaaaagcggatggaaaacaacgcccgctcggcatcgcctcgctggaggacaagatcgtccagtatgcgctggtgaaaatcctgaacgcagtctatgaaaacgactttatggggttctcatacgggttcagacccgggcgaagccagcacgatgcactggacgcactggccacagggctggtacgcactaacgtaaactgggtactggatgccgacatcagtcagttcttcgacagggtgagccacgaatggctgatcaggttcacagagcatcggatcggcgaccggagggtaatcaggctcatacgtaagtggctcacagccgggacgtcggaggagggtcaatggcgagcaacggaggaaggcaccccacagggtgcggtcatctcaccgctgctggcaaacatatacctccactacgtcttcgatctgtgggcgcatcagtggcgacgtcgctatgccacaggcaatgtggtaatggtcagatacgccgatgacatcgtcatcgggttcgacaaacgatacgatgcccggcgcttccgtatagccatgcagcgcagactgagggagttcggactcacggttcacccggagaaaacccgtctgatggagttcggccgcttcgctgccgaaaaccgtgccatcaggggaaaaggcaaaccagaaacgttcaacttcctcgggttcacgcacatcagcgggaaagatcgcaacggcaggttcatgctgatacgaaagacccgccgggatcggatgacggcaactctgaaagccatcaaagacggtctgcgaaggcgctggcattactcaatccccgaacagggaaaatggctcaggagagtggttcagggatacctgaactatcactcggtaccgggcaacttccccaccatgcagaagttcaggacacacgtaacaaacctctggcgccgggcgctcaggcgcaggagccagaaggatgatacgacctggacgaaagcaaacaaactggcagccgcatggctaccaagggttcgggttcttcatccatggcctgtggagcggttcaccgccagacacccgaggcaggagcccggtgcgtaaatcgcgcacgccgggatctgtgcggggggtatccggtaacgggtatccctaccgcgacattaatctgagcgagtcaattatgcagttttacacgcccgttgagttacgtgagatcatgctgatcccgttgtacagtgaccttgtgcaatgtggttttccaagccctgcacaggattatgttgagcaacgtatcgatctgaacgagttgctcgttaaccaccccagtgcgacgtattttgtcaaagccgccggcgacagcatgaaagacgccggcataggggaaggggatcttctggttgtggatagctcaaggacagcagttcatggcgatatcgttattgctgctgtggatggggaatttaccgttaagaagctgcagctgcatccgcgggttcagcttaacccaatgaaccctgcatattcgccaatagtcgtcggtagtgaggacactctcgacgtgttcggggtggttacgtacatcattaaatcagctggctaagatgtttgcgctttgtgatgtgaattcattttatgcatcgtgcgagaccgtatttcgtcctgatctgaaagggcgtccggtggtcgttctgtcaaacaacgacggctgtgtgatcgcccgctcgccagaggcgaagcccttcgtcaaaatgggtgaaccttatttcaagcaaaaggacatgtttcgccggcacggtattatcgcgtttagcagcaactatgagctttatgccgatatgtccaaccgagtgatgacaacgctggaggaactctctccacgctgtgaaatttacagtattgatgaggcattttgcgatcttactggtgtgcgtaactgtcgcgatcttaccgattttggcagggaaattcgcgagacggttctgcgcaggacgcacctcacggtcggcgtcggcatagcccagactaaaaccctggcaaagctggccaatcacgcggcgaaacagtggcagcggcagaccggaggagtggtggatctgtctaatcaggaaagacagaggaagttgatggctttgcttccggtggatgaggtctggggagtcgggcgccgcatcagtaaaaaactggaggcaatgggcattaaaacagtgcttcaactggctgataccgatatccgttttatccggaagcattttaatctggttctggagcgaaccgtgcgggagctgcgtggcgaaccatgcctcgggctggaggagttcgcgccggtaaagcaggagattgtctgtagtcgcagcttcgggcagcggatttccacctacgaagagatacgccaggcgatatgcttatacgcatcccgtgccgcggagaaactccgtggtgaacatcagtactgccgctttatctctgcgttcgttaaaaccagcccttttgcgctgaatgagccgtactacggcaatagtgcatcagtgaaactattgaccccgacccaggacagtcgggacatcatcaccgcggcgacgaaatgcctcgatgtaatctggcgagacgggcatcgctaccagaaagcaggagtaatgctgggggatttctacagccagggcgtagcgcagctcaacctcttcgacgataacgcgccacggaagaacagtgaaaagctcatggaagtactcgatcatctcaatgcgaaggatggcaggggtacgctgtattttgcagggcaggggatccagacagcctggcagatgaagcgtgacatgctatcaccccgttatacaacgagatattgtgatttattaatagtaagatgatattaaaataacgattgatattagtaatacatttcacaggttgcaaaaaacattttttgcaacctgctattttagctatttgtattttctcataacttgattagctattcccttatatccagggtaaatgcgggcttccccataaccttgttgaagtaagaattttagaagatcttttgctttggagcatggtaatgtgagttttaaaaatattttttctctattttgcgtgtatggctctggaggaagtatattatcaagtttgatatctaaaggagtccggtcaacagggattgaagcattatcattatttgaaaaatcgaattcaacaggcatgtgtgtaaataagcctcgttgcgcagataaattgctgttttcagagtatggagggataattaattttaattttaatcgcgagttgagatttaaccacgtggacaaatattcagcattgaagcaccatactgccaaattacctgaatcatcagtgacgccacttgctgcaaagtaggaagaaacaaaaggatcatatgaccaatccaataaacgtgtaggtataccatagtgctgggctaatgctgcgacttctaatatatcttgagaaagccattcgattctaccttgctgtgtaaaattatagtcatatcttcctattaaagaattacgtaatttttctacgttaggaactttaaggccatgattatctgctaacttgtaaaagtccctcagaattattcgctcatgctgaatttgatgccattcacgatctgaatttcgcaactgcccaggcactttggttcttggatattgattatcagctaaataccttgagttatctctcaagactgatggtaataattgaaagctctcatctgaatgccctctaaaaacgtaaccgctcaagttattattccaactacataaaaaatttagcaagtcttttgcttcattaaaatgctgctctgtagtaatcattttttaaattccaaagttgttgtgatttataaaaaaagatgattataaattagcacacttcatagtcttgccgagtattatgtaggctgtcaaggcaagataataggaagattattaatttagaggctcaatcaactccggaccctgattctttgcgttacccacggcgcgcgtcacgcagtgccagataaacttgtcggcggacacagctccgtcggctgctatcttttcagcttccttcccgcctatatcctggcgcatccattcgcgcgctgcttcctgcgtcattaccagcggccggcggtcgtgaatatcaacaagacccttatcagccgcagcggtcacaatcaaaaatccctctgcttcatccccacgctcgaaaggtacgctgccgatagccgccataaaaatcggctgaccatccttacgatggatgaaatagggctgcttcttgtcacctacacgcttccactcaaaccatccatcggcaaagcagatcgctcgaccgtgctgccacaggggtttaaacattctgctgttggctgcggtctcaaccctggcattaatcaagggtggtttatcccaccagccgggtgcgtaaccccagtgaaccggatcgaggtgcagctgttcgtctcgttcgctcagaagcaaaactttagtccccggcgccacgttgtaccggccgattggttctggatcataggcgatatcccgctcagcttcttctgcaagataagccaggtattcttcgcgtgtctgtgattgggcaaatcgtccgcacatggttacctccagtcttcagactgaaagtatagaaggtgtgggggaaacgtaggaagggaagtccgacagccatctaactgatgactgtcggagatgacgtcaaaaacattgtgtacaaaattgtgtattaaaatcaggaaaaatgcacaatttaaaaatttaacccattgtttttaattgacaaaaataattattttgtaggtgctatcgtagggcataccattccttatgtttcagtgggttagccatggcaccgagaatatcggaaattacgttgacaataatcaccagcgcgccaatcaccatcactccggcggagatcgccgcgtagtcctgctggcgaatagcgttgatcagccagcggcctagtccaggccagctgaacaccatctcagtgatcatcgccagggtgagcatggtggaaaactgcaggccgagacgcgggatcaccggcggcagggcgttgtgcaggacatggcgcagtagaattttgcgtcgcgacacgccgcgggtggcggccgcttttacatagttagtgtcatacacctcgctggtgctaatgcgcatcaggcggatcacttcagtggtgggggcgaccgccagggtcaataccggcagcaccatatgccgggcggcgctgacgatcatctcatggcgccacggcgagtccgaaagccaggcgtcgatcagcgcgaaaccggtgacgtttttcacctcatacagcagatcgaagcgaccagagaccggaagccagccgagggtcagggaaaagaagagggtcaggagcagcgccagccagaagaccgggatcgagaaaccgaccagcgcaacggcgctgatcagggtatcgggccatttattgcgcattacgccggcgatcatccccaccggaatgcctatcagcagggcaaagccgaaggcgaggatgcacagctccatggtcgctgggaacacctcgcgcaactgctcagaaatcagctggccgttaatgctggagacgccgaaatcccagtgcagcaccccttcaaaccagaacagccacgcattccacagggaagcgccctgcagtggggcatgaggggtgaaatagctcaggctgaaaccgacaaaggtcagaaaaaagagggtgatcagcagcagcagcagacggcgcagggtaaaaataatcatggcttcttcacctcttcggtattttcccgcgatacgccagcgaacgaagcgttaccgaaagggctgagcaccaggcctttcatatcatagcggtaggcctgcagccgcagcgacgaggccagcggcaggaccggcagttcgcgggcgaggatgcgctgcgcctctttgtaagcgtccatccgcgaggagagctgctgcgagagcagcgctttttgcagcacgtcgtcaaactcccggttacaccagtgggcaaagttggtttgcgaggcgatggccgcgcagcttagcagcggtcggaagaaactgtccggatcgttactgtccgtcgcccagccggagagcgtcaggtcgtggctcatgtccatcaggcgcgcctcctggaaacgtccctctaccggcacaataatcaccttaacgccaatctgcgccatatccgcctggataagctccgccgttttcagcgggctgggattccacgcctgcgagctggtgggcacccacagcttgagggtcaggttttccagccccagggctttcaggcgggcgcgggcctcctgcggattatattcggtaattttagcgtcattatcgtaggcccacgaggcccgcggcagcatggacgccgccgtctccgcggtgccatagtagatggactgcatcaggcgctggttgttaatcgccagcgccagcgcatggcgcacctcagggttatccagcggcggcttggcggtgttgaaggccagccaggcgatgttcattcccgggcgcagcgtcaggcgcaggcgcgggtcgtcacgcaggatcgtcaactggctggcggccggccaggccagcacgtcgcattctccggttagcagtttcgacaggcggccggtgccgccggagccaaggtcgaccaccacctggggcatcaacggtttgccgcgccagtagccggggtggcgctgcaggcgaacatattgtccggagcggtaatcggatagctggaacgggccggtgccaaccggctggcgatccagttgctcctggcggtcgtcctgcgttaagcgggcggcatattcggcagaggtaattgacgcatagtgggtggccagatgccagaggaacgaggcgtccggccgcttgaggcgaaactccacggtctgattatccagcttgcggacgctctccacgctgtcagcaaactgcagactgtcgaagtaggggaagctgctgccgttgacgttgtgccacggatggtcgcggttaaaaatacggccaaaggtaaaaatgacgtcatcggcattaaagtcccgcgtcggggtaaaccacgccgtgcgttgaaacgggacgtggcggcgcaggtgaaagcggtaggtggcgccgttatcgagaacttcccagctctccgccagctcggggaccagccggtaggtatagggatcgacgtcaagcagacgatcgtagatctgagcggccagcgtatcgacaatcaggccgctgctgactttctgcggattaaaggtattaacctggccgctgacgcaatagacgaaaccgctatcgcggatatcggcgcggtcggggagcgcaggggcggcaaaagctggcccacacagcagggaaacggctgccaggagagatgacaatttcaggcgcatattttctgtttgattatagagctgaactctatcttattaagattaatagacattcaccaccgccttcaacaagcctgagggataatgcggttaccgggtgcgtatagtattcagtcaattgattaaaatagtcgcggaaccgagtctgtatagtgaaacatggtaactttttatcgccgatatcgccagtcagctctgtttggccgcggttgaccaaacggcgacgacgtgcggacgctagagaatagattcagtatagcggggagaaagccgatgacccgacgggcgactagccgtacccgtcgggtgtgatacagggggagcgtgtttcgattattgtgacagtgtcactttatgatagtccatattctgcaggtcctccagcagcccggggccaaccggctgccactgcaagcgctcgcgggtccatgccgagctggcgcgcaggtcaagggcggtaaacggcgcaaaccagccgaaccaggcgtcgacctgcgactcatccaggtgggtcagcggcaggtttaatccgtgggcaattaccgcggcaatatcgcgtaatgcgatcccctcttcggccaccgcatgatagcgctcgccggccgcgccctgaagcagcgcgctgacatacagacgtgcgacgtcatcgacatgggcggctgaccagcggttgcttccctcgccgcgcagggctaccgccccgttggcgaccgcgcgttcgatgtagcaggtcagcagtccctgacgcacggtgtcatgcacctgcggtaagcggaccaccttgacatccactcccgcctccagcaactgctggccggcgagctctgaggcggtgcgcgggctggggtgcgctgagttgaagaacgactcccgggccggggcgccgctcccgtcgtcgcccatcagcgtgccggaggtgatcaccagcggccgcgtgctgcctcgcagcgcctggcccagggccaggatcgcctggcggtctttctcgcagttagcggcaaagcggctgaagtcgtggtcgaaggcggtatggatcaccgcgtcggcgttcccgacgccagccagcagcgactccggggcatccagcgtgccgcgatgcacctcggcgccggccgccttcagggcctgtgcggtgctttcgctgcgcgcgaggccgataaccttatggcccgacgcctgcagcgccggaagaatacgtgagccgataaatccgctcgcgccggtaagaaatatacgcatcatggatctcctgaatgggtttcaggcgtatcctacctgcgatgtcatactataaaagtagagacattatcggggtataaattctaacaggcagaacccacaggcagatgatgaacacttctgacaaccatgctttaggcgattttctccgcgcccgccgccagcgtctcgatccggcaacgtttggcttcccggcgggacgccggcgcaccccggggctgcgccgcgaagaggtcgcgcagctcgccagcatcagcccgacctggtatacctggcttgaacaggggcgcggcggggcgccttcccgcgaggtgctggagcggatcgcccgcggtctgcggctgaccaccccggagcgcgaacatctgtttattctcgcctttggccatccgccgcagacgcgtctgacggtgacggatgatatgacgccgcggctgcagcgggtgcttgacgctttcaccattccggcgattatccgcaccgccagctgggacgtcatcgcctggaatgcgccggcggccagggtgctgaccgactacagccaactgccgctggcggagcgcaacgtgctgcgccgcctgtttacccggccggaggcccgctgcactctggaggactggcagagggtggggcagcttatcgtcaacgccttccgcgccgacgtcacgcggatgggcgccacgaaagaaactgaccagttgatcgcggagctcagccagcagagcgtcgagttcgcccgtttttggcaaagccatgacgtcgccggtcatggagaaggctataagcgcattaaccacccgcagatgggtcagctcgacctggaatttacctcctttgccgtggagggccgtcccgatctttccctgctggtctttaatccggcaacgacggaaagccagcggaaaattcacggtttacttcagggggctgtgggcgactgaggggtaaactcgtacagcgccagcgcgttgctctgcagcgagtcgatccgcagccaatagccattgagcctggcttcatccacgctgagcgccggacgggcctgatgcatcagccactgataatcctcggcgtcagggccgctgcggctgcgaaaggcgtccaccagcgggaacaacgcgccgtggtgctgatcgaacaggtgctgtttgatgcgccagctgccatccaggccctgcagccgcacgctgtagggctggctgaagcgctggataaaggccgcttcgctggagagccagggattgtagaccaccgtattgcgcagcagcagctggtagtgaccctggtggtggagcagcagcaggtttttatcgtgaaccaggatctcgccgcgcagccgccgccagagccagagtacccagtaaaccgggcgcggcaggccgtgcagatagtgcagcgccaggctggaggtatcgagcttgccgttggcgcgagcttcgccctggaggcctgaatttaaccagaagcccgccagccagacctggtccgccacccccagcagattatccatcagcagcgcgccgcgaaaaaagcggccgttggtatcccgcgtatcgccggtcagcgtattccaggagagcagccacagcggcaggttgagctgacgctggcgcagggcgctgtggatctgccgcagcttgtgcagcggataatgttcgctggaggccaggcggctgctgtctgcctgggccagatccagctgttcgttggcatctgcctggcaggcgagaaaatccgcctctgccagcagcggcgagtggaacagcggatcgttcccgggatcgctgggagcaaagcggtgccagatccccagctgcggctgcggcagcaggcgatgaaggaccccgcgctgctgccgccaggcggcctggcgcgcagcttcgctggcctgcggcgaccagtgccagacaaagcgccagctattgagcgtggctggcggaaaatggttggcggcgagctgcaggaagcgctgcagcaggtcgctgcgggtggtgacgccggtgtgcaggatcacctgccagcccatcgccgccagccagctaaaaatctgctgcaggttgtaccagcaggcgtagccggccatctgcggatcgtcccagccggtgccgaacagccgactgctgagaaagggatcgttgatatcgatggcatacaccggtagggcgtggtgcagctgttcgagttcccggcgcacatcttcgcgcagcagatcgtccagttcgcgcacggtcaccaccatccgggtatggcgcagcgctgcggggcgcgctggacgatcgcgcagattgatctcccgggtctgcggtgggttgatcggcagggggggactttcccggtcgcgtggttccggctcattgagtcgcgcatacagccggtcggccgccaccggctgccagcgatcggcctgcggcgggcgcggtcgggcaagctccagaggatgctgttcacgatactggcgcggcgtcacgccgtgctggcgcttaaacaaatcgctcatcattcgcgtactggcgaatccctgttcgcgggcgatttgctggacggttttgcgggtggttaatagctggtcggcggcgtggcgcaggcgcagcgcggtgaggtactggacaaaacttaccccgacctctttgcgaaataagcgtgacagccaggcctcggagacaaattccgcggccgccacctcctgcaacgagaggcgacgctgatagttagcgtcgatccgcgctaccacgctggctattctccggctccatttttcggtatcgcgccggggcgtggaggcgatgggctggctaaagcgcgtggccagcagcagcgctatctcactcagccagcggttggcctccagtcggtaatggccaggatgattgaccaggccgctcaccagcagctggcgcatcaggcgacgcaggccgtcatcggcatcccgggtgcgcggcgttatctggtaatcgacggcaaaaaaggcattatcgaggcgggccagccagctggcggagagggtgaggatcatcacggcgttggccccggcgctgcgcaggctccagcgacggttgcggttaacgatcgccagcccgtcggcgacgagcggttgcgacgcaccttccgccaccgccagatttacgcttccctccagcacccacagcagcgtcagcagatcgctttccggctgggtcagctgacgcacatcgcgtacggtgacgctaaagtcgcctgcatgctgctccacatgactctcctctgtagacaaaaaacaaccggttgttttttgtcataaccgatatgtatgaaaaacactcattgatttttcgtcaatataaaacaaaaaagcgcgcctgcaagctgagccacccgcataaactcgaaagtgtcgtgcaaacacaacacaggaataacaaaaatgacacatccgttgctagaagcattgcaggttaacgaggcgcaatttatcgctctgcgtcgtcggttccaccagcagccggagatcggctttgaagagcaccagaccagcagcgaggtcgcccgactgcttggcgagtggggatacgaggttcaccgcggcctggcgggcaccggagtggtgggcacgctgcgcgtcggcgaggggaaaaaacgccttggcctgcgggcggatatggatgccctgccgatgcaggagcggagcggtaagccgtgggcaagccaggttgaagggcgctttcacggctgcggccatgacgggcacaccaccacgctgctctacgcagctgaatatctggcgcgcacccggcagtttaccggcacgctgcagctgattttccagcccgcggaagagttgctgtacggcgggcgggtaatggtcgaggacggtctgtttgaccagttcccctgcgacgccatcttcggcctgcacaatatgccgggtcagccgttgggcaagatcggcctgcgcgacggggcgatgatggcctcctccgatacgctgcatattgaagtgaagggcgttggcggccacggcgcggtgccggagcatacggtggatgccacgctggtggcctgccatattaccctcgcgctacagtccattgtctcgcgcaatatcaccccgtttgaaccggcggtggtgaccgtcggcagcatccaggccggtcatgcgcccaatatcattaacgatcacgtgctgatgaagctcacggtgcgcaccctcaatgagcaggtgcgcgagaccgtgctgcagcggatccatgatatcgccgtggcccaggcggagagcttcaatgccaccgccacgctgacccacgtcaacggcagcccggtgttgcgtaacgatccggcgacgaacgccatggtgcgggaggtggcgacagcgctgtttggcgcagagcaggtgggcgaggtgaagccgtttatgggcagtgaagattttgccttcatgctggagcagcacccgcatggcagctatttcaccatcggcgctggcgatgagccggatcgctgcatggtgcataacccggggtatgacttcaacgacgcgctgttgctgaccggcgcggcgctgtggtgcggcctgacggaacgctatctgcgctaatcacgagaaacgggagggccatgcgatgagcactgtcacaataagcgacaccccgtttgtcggcaacgatcgcctgctggtggggattgtgttaagcgttttaaccttctggctgttcgcccagtcggtgattaacgtggtgccggcgatgataagcagtcttgatatctctcttgagaccttaaccctggccgtcagtctcagcgcgctgttcagcggctgcttcgtggtcgccagcggcggtctggcggacaagtttggccggatgcggatgaccaccattgggctggggctgagtatcgtcggcagcgccatgctggtggtcgctcagggaccggggctgttcctcgccggccgggtgctgcaggggctgtcagcggcctgcattatgccggcgacgctggcgctgattaagacctggtatgaggggcgtgcgcggcagcgggcggtcagcttctgggtcatcggctcgtggggcggcagcggtctctgttccttcgttggcggggctatcgccaccggactgggctggcgctggatcttcgtcttctcgatcgccgttgccctgctggcgctgtttttgctgcgcggcacgccggagagccgcagcgccagcgccagccagcataagctggacgtcggcggtctgctgagcctgattgttgcgctggtgctggtgaatctgtttatcagcaagggccacggctggggctggagcagcccgctgtcgttgaccatgctggccggggcgctggcggcggggacgatatttatccgcaacggcatgcgcaaaggcgaggcggcgttgattgattttgcgctgttccgcaatcgggcctacggtgcggcagtgctgtcgaactttctgctcaatggggcgattggcaccatgatgatcgccagcatctggctgcagcaagggcaccacctgacgccgctggagagcgggatgatgaccctcggctatctggtgaccgtcctggcgatgatccgggtcggcgagaagctgctgcagcgctatggcgcccggctgccgatgatggccggtccggtgttgaccgctatcgccatcgcgctgatatcctgcacctttctcgaaaaggcgctgtatatcggggtggtgttcgccagcaacgtgctgtttggcctcggactgggctgctacgccacgccatcgacggataccgcggtggccaatgccccggagaacaaaatcggcgtcgcctcggggatctataagatgggcagctcgctgggcggggcgatgggtatcgccgtgacagcgtcacttttcgcgctgtttttaccgctgggcatggcccatgccgcccagtatgccctgtggtttaacgccgtcttatgtctgggggcgatggcggtgagcgcgctgctgctgccgcgcgcctctcacagctgatgctttttcagcagcgcgcggagctggtgataggttaatcccagcagctccgccgcctgcttctgatgatacttcgcctgctccagactccgctgcagcaggcgtttttcctgctggagctggaaatcgcgcagatccagcggtagcgcgggcagctcatcgccgggcgcggcttccggcggagagccgggggactgacgaaaaggattaataataatcgcgtccagctcatgttcgctgtcgccgtggcgatacaccgagcgctcaaccacgttcttcagttcgcgaatattccccggccagcggtagccgagcagcgtcgcggtcgctcgttcgctaaagccgggaaacagcggcagaccgagttcgcggcacatctggatggcaaactggttggcgagcaacatgatgtcgctctgccggtcgcgcagcggggggagctgtaccacgtcgaaggccaggcggtcgagcaggtcggcgcgaaaatgaccttcctcgaccatctgcggcaggtcagcgttggtggcgcacaccagccggacgttaacctgcagcggctggctgccgcccacgcgctccagctcgccatattcaatcactcttaacagcttctcctgcaccagcattggggctgtcgccagctcatcgagaaacagcgtcccgccgtcggcgcgctcgaagcgcccgggatggcgcttgctggccccggtgaaagccccggcttcgtggccgaacagctccgagtcgagcagattatcgttcagcgccgcgcagttcaacgagataaacggcccctgccagcggctggagaggtagtggagacggttagcgataagctctttcccggtgccgcgctcgccgatgaccagcaccggtttatccagcggggccagccgggaaacctgttccagcacctcgagaaagctgttggcctcgcccagcagattatccttgtactgcgccatgatgaatttcgccattaagtagtgtaattaaccaggtgactgtagcaatgcccagcacgtttcgcaaccaccctgtttaaaatcaataagataaaaagttggcacgccatttgtattagctaagccacaggtgaatgcctgaaaccagaactatgaggattgaaattatgggtattttttctcgttttgccgacatcgtgaacgccaacatcaactccctgctggagaaagcggaggacccgcaaaagctggtgcgtctgatgatccaggagatggaagacacgctggttgaggtgcgttcgacatcggcccgcgcgctggcggaaaagaaacagctgtcccgtcgtattgagcaggcggtcgcccagcaggcggaatggcaggaaaaagccgagctggccctgcgcaaagagaaagaagatctggcccgggcggcgctgatcgaaaaacaaaagctgaccgaccttatcgctcagctggatcatgaagtgcagctggtggatgaaaccctggcgcggatgaaaaaagagattggcgagctggagaacaaactcagcgaaacccgcgcccgtcagcaggcgctggcgctgcgccatcaggcggcgagttcgtcccgcgatgtgcgtcgccagctggacagcggtaaactggatgaggcgatggcgcgctttgaatcctttgagcgtcgcatcgatcagatggaagcggaagcggagagccaccgctttggcaagcagcagacgctggatcagcagtttgccgaactgaaagcggacgatgaaatcagcgagcagctggcggcgttgaaagccaaaatgaatcagtccaaccagtaagtatgattgcgcggcgcggcgttgcgccgcggctcaccccctgtaaggagtacacatgagcatgctttttctcgccattccgctgacgctgtttgtgctgtttgttctgccggtctggctgtggctgcactacaacaatcgcggcgccaacggcagtctgacgcaaaatgagcagcaacggctgctgcagttgaccgatgacgcgaagcggatgcgcgaacgcattcaggcgctggaagcgatcctggatgccgaacatccgaactggagggacaaataatggccggactggatctgaataaaaaactgtggcgtatcccgcagcgcgggatggtgaagggcgtctgcgcgggtattgctcagcatcttgatgtcccggtgaagctggtgcgcctgattaccgtgctggcgatgattttcggcctctttttctttgtcctggtggcctacatcattttgacttttgctctggatccgataccggacagcgagctttacggtcataaagcgccgagcaatggcgatctgctggccgccgtggatgccgaactggcctccggtgaacagcgtctgcgtgaaatggagcggtatgtgacctccgacacctttacgctgcgcagccgctttcgccagctgtaaaccctgtttctaacgaatgaggcaacgcatgaatagcaaatggcaacgcgccgggcagcaggtgaagcccggtctgaaaatcgtcggtaagctggcgctgctgaccgcgctgcgttatggcccggcgggcgttgccggctgggcggttaaatcggtcgcgcgtcggccgctgaaaatgctgctggcggtggcgctggagccgctgctcagccggctggccaaccgcgtcacgcgcgggatgaaataatgccgccgtggggaaggcgcaaaaggattaacgttgtcctgcttatccccggcagatagcttatgatgacgagacataccttcagggcataacggactggcgatgaagcgactgaaaactgaattgaatgcgctggtcaaccgcggggttgaccggcatttacgtctggcggtgaccggcctgagccggagcggtaaaacggcgtttatcaccgcgctggtcaaccagctgttgaatatccacaccggcgcccgcctgccgctgctgagcgccgcacgcgaagagcggctgctcggcgtcaagcgcgtgccgcagcgggactttggcattccccgattcacctacgacgaagggctggcccagctgtacggccagccccccatgtggccaaccccgacgcgcggggtgagcgagatccgtctcgcgctgcgctaccgttcgaatgactccctgctgcgccattttaaagatacctccacgctgtatctggagatcgtcgactatccgggggagtggctgctcgacctgccgatgctggcgcaggattatctgagctggtcacgacagatgaccgggctcctgcagggacagcgtgcggagtggtcggcccgctggcggcagctgtgcgccgggctggatccgctagcccctgccgacgaggctcggctggcggatatcgctgccgcctggacggactatctccacgcctgtaagcgtgaagggctgcactttatccaacccgggcgctttgtcctgcccggagaaatggcgggcgcgccggcgctgcagtttttcccgtggcccgacgtcgacgccgtcggcgaagccaagctggcgcaggccgataaacacagcaacgccggcatgctgcgcgaacgctacaaatactattgcgaaagggtggtgaaggggttctacaaagagcacttcctgcgcttcgaccggcagattgtgctggtggactgtctgcagccgctcaacagcgggccgcaggcgtttaacgatatgcgcctggcgctgacccagctgatgcaaagtttccattacgggcagcgcaccttgttccgccggttgttttcgccggttatcgacaagctgctgtttgccgctaccaaagccgatcacgtcacgatcgatcagcacagcaatatggtgtcgctcctgcagcaactgattcaggacgcgtggcagaacgccgcctttgaagggatcagtatggattgcctggggctggcgtccattcaggcgacccagagcgggctgattgaggtgaatggcgagaaaattcccgccctgcgcggcaatcgcctgagcgacggccagccgttgaccatctatcccggtgaggtgccggcgcgcctgccgggccaggccttctggcagcagcagggatttcagtttgaaaactttcgtccgcaggtcatggatgtcgatcggcctttgccgcacattcgtctcgacgcggcgctggaatttttgattggagataaactgcgatgagcgaaccgttaaaaccgcggattgattttgatgggccgctgcaagcggagaaaattccgccgctgaaaggcgctcgcgccttcgacaccctggaggcggacaacttcgcgccagcgcggctggtgaccggcgaagaggaagagggggcggcggaagcggtggtggagtcggtcctgcgacccaaacgcagcctgtggcggcggatggtcagcgccggactggcgatcttcggcgtcagcgtcgtggcgcaaggcgtgcagtggacggctaacgcctggcagacccaggactggattgcgctgggcggctgcgtcgccggggcgctgatcgtcggagccggcgtcggttcgctggccaccgagtggcgccgtctgtggcgactgcgccagcgcgcccacgaacgcgatgaagcgcgcgatatgctgcacagtcacgcggtcggtaaagcgaaagcgttttgtgagaagctggcgcagcaggccgggctggatcagtcgcatccggcgctgcagcgctggtatgccgcgatccacgaaacgcaaagcgaccgtgaagtggtgagcctttatgcgcagctggtgcagccggtgctcgatgcccaggcgcggcgggaaatcagccgttcggcggcggagtcgacgctgatgattgccgtcagcccgctggcgctggtggatatggcgtttatcgcctggcggaacctgcggctgatcaaccgaattgccacgttgtacggcattgagctcgggtattacagccgtctgcgactgtttcgcctggtgttgctcaatatcgctttcgctggcgccagcgaactggtgcgcgaggtgggcatggactggatgtcgcaggatctggcggcccggctgtcggcgcgcgccgcgcagggcattggcgccggcctgctgaccgcccgtctcgggatcaaggcgatggagctgtgccgcccgctgccgtggatcgccgatgataaaccgcgactcggcgattttcgtcgcgagctgattgggcagttgaaagagaccctgcagaaaagcaaaacccacccggagaagtaacctccgctcagagacatcgccgggcggcggcttcgccttgcccggccttcgacgtcaagctctggtacgtgcaccctggcaatattcgattaggcgcattccgccgccagccactcgctgaaggcgcgaaagcgcgggcgggaacggttctcctgcggacaaatcaggtcatagccaaagggcgagggcgcttcattttcagacaaggccaccagcctgccggcgtcgagcagcggctggatcagcgttttacgccccatcaccacgccgagtccattgagcgccatctcgatggccagcgagtggttattcaccgcgtaataccggccgtcaaaaggtaacgcctgtccgctgtgctggcaccacaggcgccattccgcaaattgatcctgtacgtcggtggattcgcacgcatggatccagacgagcgccgccgggtcgccgccgctcagcggacgatactgctggcgataacgcggggagcagaccgggagcaaactttccgccatcagccgctgttgataaagatcgggatagcgcgtggcgccgtagtaaattgccagatccacccgctcctcgttaaaatccatcaccccggcgcgcacgcgaaactgcagattcagtcccggccattgcgtctgaaagcgcggcagacgcggcattagccacagatgggccagcgtcggcgcaataccaatatgcagcgtgccgcgcagatcctgatcgcgaatatcctcaatttcatcgttaatcgcccgcagcgaatggcttaacgtcgccagcagccgcttaccttcctctgtcagcgccagtttacgcgtcatgcggataaacaggcgaaacccgatgtgcatctccagcctgcggatccgatggctgaccgctccctgggtaaggttcatttcatgcgcggcaagggtaaagctcaggtggcgggcggtcacctcaaaggtctgcagcagcgcaaggatgctttgttgctcaagcgcagattgtctcccttatgcattaattgagttcatgcataggccgatttaattcgtttgttaggccagttttgccggttttaaatagttatatcgtaactaaaccgaggtataccatgtcaggactcaaaattgtggtgattggcggtggctccagctacaccccggaactgattgaaggtttgctcaaccgctatcatgaaatgccagtcgcttcgctatggctggtggacattgaagagggcaaagagaaagtcgagattatcgccggactggcgcggcgaatgatcgccaaagccgggctgactattgaagtggtggccacccttgaccgggaaagcgcgctgcgcgatgccgatttcgtctgctcgcagtttcgcgccggctgccttgacgcccggatcagcgatgaacgtatctccctcaagtatggcttgatcggccaggagaccaatggcctcggcggcttcgccaacgcctgtcgcaccattcccatcgccctggagatcgctgccgatatggagcgactgtgtcccgacgcctggctgctgaactttaccaacccgtcggggatggtgaccgaagcgatcctgcgccacagccgcatcaaagccgtcggcctgtgtaacgtgccggtgattatgcaaaaagggataaccactctgctgcaatgcgctgacgaaaaagaggtggtgatgcaggtcgccggcctgaaccactttatcttcgtgcgccagatcctgcacaaaggtaaagaatggctgccggaggtgatagccgagatcaacgccggtcgggatccgctggtgccgcgcaacattccgccgttccgttggccgtcgcatctgctgcagggcttaggcatgatcccctgcgcctatctgcgttattactacatgaaagacgatctgctgcgccaggagctggcggaggcgggcggcgaaggaacccgcggggaagtggttaagcagctggaaaaaatcttgtttgaccagtaccgcgacccgcacctggcagtcaaaccgaaggcgctggaagggcgcggcggccagtactattccgaggcggcctgcgagctgatgaatgccatctacaacgacaagcggattatcatgcacgtcaacacgcgtaataacggcgccatcaatggcctgccggatgactgcgcggtagaggtcagctcgctgattaccgcttctggtccgctacctctcaatgtggcgccgttcccggaagataccctgcgtttgctgcagctgatgaaatcatttgaacggctgactatcgaggccgcgctcaccggcaaccgccataccgcatggcgtgctctgatgctgaatccgctgatcgtcagcggcgagaagctcgaactggcgttggatgaggtgatcgctgagaaccgtcagtggctgcctgctttccacgcctgacccaagactcaccggccgcctggccggtgatttaaccactgaccgtctgactttacgccacagcgcccatttttccgccacactgtcaataattgttgacagttagcttcccgaaaacccattcctggcctattattctcccgtcattggcacttttagggtgaacactcccatgcgtcttgaagtcttttgtgaagaccgtctcggtctgactcgtgaattgctcgatttgctggtgctgcgtggtattgacctgcgcggtatcgatattgaccctattggccgaatttacctcaatttcgccgaactggaattcgccacgttcagcagcctgatggctgagatccgccgtatcgccggcgtgacggacgtgcgcaccgtgccctggatgccgtctgaacgtgaacacctggcgctcagcgcgctgctggtagcgatgccggagccggtgctgtcgctggataccaaaggtcgggtggaactggcgaaccccgccagctgcctgctgtttggccaaagccaggcgaagctgcgtaaccacccggtggcccagctgatcgccgattttaacgttcagcgctggctggagagcagcccgcaggagacgcatgcggagcatgtggtggtgaatgggcagaactacctgctggaagtgactccggtctatctggaaggagagcataacgagcgagtgctgaccggcgccgtggcgatgttgcgctcaaccgtgcgcatgggacgccagctgcagaccatgaccagccaggataccagcgctttcagtcagatcctcgcggtggggccgaaaatgcgccacgtggtggagcaagcgcgcaagctggcgatgctcagcgcgccgctgctgattgtcggcgacaccggcaccggtaaagatctgctggcccatgcctgccatctggccagtccgcgggcgggcaaaccctatctggcgctcaactgtggctccattcccgaggacgcggtcgagagcgagctgtttggcgacgcgctgcagggcaagaagggcttcttcgagcaagccaacggcggctcggtgctgctggatgaaattggcgagatgtcgccgcgcatgcagaccaagctgctgcgctttctcaacgacggcaccttccgccgcgttggcgaggatcatgaagtgcacgtcgatgtgcgggtgatctgcgcgacgcagaaaaacctgatcgagctggtgcagaaagggcttttccgcgaagatctctactatcgcctcaacgtcctgacgctgtatctgccgccgctgcgcgattgcccgcaggacatcatgccgctgacggagctgttcgtggcccgctttgccgacgagcaggggatcccgcggccgaagctctctgccgatctcagtacggtgcttacccgctacagctggcccggcaacgtccgccagctgaagaatgccgtctatcgcgcactgacccagctggaaggatttgagctgcgtccacaggacattctgctgccggaccatgacgtcgcctcgctgccggtgggcgaggaggccatggaagggtcgctggacgacatcacccgccgctttgagcgctcggtgctgacccagctctatcgcagctaccccagcacccgtaagctggcgaagcggctgggggtgtcgcataccgccatcgccaataagctgcgtgaatatggtctgagtcagaaaaagggcgacgaataatcccgccaggccggcgacccacgtcgccggcatcccggcctgcaaagcgggccaaacctgtatatactggttttttaatcctttttccggggtggtgcatcttggcgtcgcgtcgcgcgatcgggcactggctgatattgctgctgctctctgttctcttttcctcgctgctgttacgaatacacctgccggcagcgctgctgctggggccgctgatcgccggtctcattttgagcctgcgcggggtgaagctgagcatccctcgcccctgttatctggtggcgcaggccattgtcggctgcatgatcgcccgggcgattaatccctctgtttttggcgtgctgttcaacaactgggcgctggtgctggcgatcctgttgaccaccctggcgataagcggccttaccggctggctgctggtccgctacagcgcgctgccgggcgccactggcgcctggggaagctctcccggcggcgcgtcggcaatggtggtgatggcccaggagtacggggccgatgtgcggctggtggcgctcatgcagtatctgcgggtgctgtttgtcgtcggcgcggcggcgctggtggtgcgctatgccctgggcaatgaagcacaggaaatgactcaggatattgtctggtttccatcgttgaccctgaatttccctttcacgctgctgctgacggcggtggcctgttggctgggcatgcggctgcgcatcccctccggggccatgctgctgccgatgctgcttggcgccctggcccagggcggcggctggctgatgctggagctgccggagtggctgctggcgatggcctatgcggtgctgggctggacggtggggctccagtttaataaagccatttttctgctggccctcaagacgctgccgcagattatcgcctccatcatcggactgatcctgatgtgcgccctgatggcccttgccctgacccacattctgcagatggactttatgaccgcctatctggccaccagccccggcggcctggacacggtggcgattatcgccgccggcacccgggcggacatgtcgtttattatggcgctacagacgctgcggctgtttaccattttgctgaccggcccggcgatggcgcgggctatctcccgctatgcgccgcggcaataaaaagccctcgcagagcgagggctgggcagatcgaatgtccgcgagcgcgatgcgcccgggcaatctgttatcaggctttcagggcggccagcgcggcgtcgtagtccggctcttcggtgatttcgttcaccagctggctgtagacgacctgatcgttttcatcgataacgaccaccgcacgggcagccaggccagccagcggaccggtggcgatggcgacgccgtagtcagcgaggaaggacgcgccgcgcagcgtggacagggtgaccacattgctcaggccttccgcgccgcagaagcgggactgggcgaacggcaggtcagcggaaatgcacagcactacggtgttgtccagttcagcggccagctggttgaatttacgcactgatgcggcacacacgccggtatcaatgctcgggaaaatattcagtactttacgtttgccggcgtactggctcagcgcgacgtcagagagatctttggcgaccagcgtaaacggctgcgctttagcgcctgcctgcggaatggtgccctgaacagaaacggggttgccctggaaatgcacggtttgtgacatggttatcttcctgtttacatatagttaacgtcgcgagtagtgtatgacatccgccagctacacggcaaaccctatttaacatttaccagagaggacaagggaatgcgtaacgtgcgagtgtatgaggaagcctggccgctccataccccttttgtgatcgcccgcggtagccgcagcgaggcaaaagtggtggtagtggaactggaagaggacggcgtgaaaggggtaggcgaatgcacaccctatccccgctatggcgagagcatcgcctcggtcatggcccaggtgatggcgatcggcgagcaactggaggcggggcttacccgcgaacagctgcagcggctgctgccggcaggcgccgcccgcaatgccattgactgcgcgctatgggatctgcaggcccggcgcgaaggcaaaaccttggcccagctgttgggcgtggcgttgcctgaccgggtgattaccgcccagacggtggtcattggcacgccggatcagatggcggccagcgccgcggcgctgtggcaggcaggggcccagctgttgaaggtgaagctcgacgatcgactgatcagtgagcggctaatcgctatccgccaggcggcgccggaggctacgctgattgttgacgccaatgagtcctggcacagcgaggggctggcggcgcgctgtcagctgctggcggacctcggtgtggcgatgcttgagcagccgctccccgccgacgacgactcggcgctggaaaacttcgttcatccgctgccgatttgcgccgacgagagctgccacacccgggagagcctgccgcggctgcgcgggcgctatgagatgatcaatatcaaactggataaaacgggcggcctgaccgaagcgctggctctggccggggaggcggaacggcaggaatttgaacggatgctgggctgtatgctctgcacctcgcgcgggatcgccgccgcgctccctctggcgccgctggcgcgcttcgctgacctcgacggcccgacatggctggcggtggacgttgagccggcgctgcggttcagcaccggcgtgcttcatctttaagcctgccagcgcagcagatcggtcatcgccggcaggtaacgctccgttgcctcgtcggcggagaccggcgggaactcggcggtgatgcaggggagtccgatatcggcgcaccagctgccaaaggagcccggcgtgtcgtagcccacgctgcccaccagcggcagggagaaggcgtcggccagccagcgacccagcgggctgtggcccggatcttcgatgcaggccagcggatcgtgaaaggagaccacccacgccggatgaatctgatggatcaactgacacagggcctcggtctcccgttccgaacccggctgctcgccggtcaacagcaccacgtcgcgctccgccgccgcgctattccagcggtaaaccgtttccccttgcttccagttggctgccggaaagttacggttgaggtcaacgccgcgggcattggcgcgcagcccgagctgacagccgtcaggattgaccgtcagcaccacgtggtggcggcgcagctcgggtttcagggtgcgcagggcgcaggagagggtcacaatcgacgaattctcatcaccgtgggtaccggcaataatcagcccgctacggctgtcggcctgcggcgcaggaaaccacagcagcggcgcgcccagttccgagctgccatactgccgggttcccggcggaaagtcgccgcgctgcgggcgaggacgtgaaatagacatagggcttcctgtgtgtcgttattatttagtgttggcgaaaagcgtatcgggatcaaacccattccctgaggcgtgaaatccgacggcacatcaattttctatcatatgtcgtttgcaatttcaggtgatgaaacaaataattatcgctctgttggcggtatttttttcattttaaaggggatcttatgaagtatcctgtcgctttgacatgcggcgcgctgtggttagccagcgtatcttctctggcctgggcggctgacgtaccgccgggcacggtactggcggaaaaacagctgttagtgcgccatatcaaagatgaacccgcctcgttagatcccgccaaagcggtgggcctgccggaaatccaggtgatccgcgatctgtttgaaggtttagtcaatcaggatgcgaaaggcaacctggttccaggcgtagcgacccgctggcagagcaacgataaccgcgtctggacctttaccctgcgtgataatgcccgctggtccgacggcacgccggttactgccgaagatttcgtctatagctggcagcgtctggtggatccgaaaaccacttcgccgttcgcctggttcgcggcgctggcggggatcgctaacgcgcagaacattattgacggcaaagccgcgccggagaccctgggagtcaccgccgtcgacgcccacaccctgcgggtgcagctggataaaccactgccgtggttcagcaacctgaccgccagctttgccttctatccggtgcaaaaggcgaatgtcgagagcggggcgaactggacgcggcccggcagcctggtgggcaacggcgcctatgttctgaaagaccgtgtggtcaatgagaagctggtggtggtgccgaacacgcactactgggataacgccaaaacggtgatccagcaggtcacctttgtgccgattaaccaggagtccgccgccaccaagcgctatcttgcaggggatatcgatatcaccgagtctttcccgaaaaatatgtaccagaaactgctgaaggatattccggggcaggtgtataccccgccgcagctgggtacctactattacgctttcaatacccaaaaggggccgacggcggatgagcgggtacgcctggcgctgagcatgaccatcgatcgccgggtgatggcggagaaagtactggggaccggggaaaaaccggcctggcgcttcacgccggacgtgacggcgggcttcaccccccagccgtcacagtttgagagcatgagtcaggctgagcttaatgcccaggcgaaagccctgctggctgccgcgggctatggcccgaatcgtccgctgaagctgacgctgctgtataacacctctgagaaccaccagaagattgccatcgcggtggcgtcgatgtggaagaaaaacctcggcgtggaagtgaagctgcagaaccaggagtggaaaacctatatcgacagccgtaacaccggcaatttcgacgtgatccgcgcttcgtgggtgggggactacaacgagccgtccaccttcctgtcgctgctgacctccacccacagcggaaatatttcgcgctttaacgatccggcgtacgacaaaatcctcgcccaggcggcggtagagaattcggccaaagcgcgtaacgacgattacaacgcggcggaaaagatcattatggtcaaagcgccgatcgcgccgatctaccagtacactaacggccgattgattaagccgtggctgaaaggctacccgatcaccaacccggaagatgtggcctacagccgtaccatgtatatcgtgaagcactaaccggtactggttgcctgataacgcaaggtaaccacgtataaacccagagctggcgcgtcttgccgcgccagtttctcctgctctccttctcgcgccacagtagaaagtctcacttttctggcagtatggccaaatgatgccaggttctaccatctggtcgcgaagcatcagaagatctcatccgccgggtttttatcatgatgctcaacgtattcggcaatcatgccatccggatgccgaaccagcatgttccagccggtgggcacggccttcaccgggttgataatcgttgccccggtggaaggcagatgtttctcccaggcggtaatgtcgtttaccaggaaagtggcctcggtggcgcgaaacggagccaggctttgctcggttccgccaattaaaagcacggaacccacctgcgccagtttgagatcgtattcgggatagtcaaaacgtaaccttgccttttgcgaaatgagatgttcataaaacgaaacggtttcttcaaagcgggcaatcagcacgcatcgacggatcaggatattaaggactttcattatatctccttcgccattttctcagagatagcgtagcagcactgaggtggaatgtaaggctcaagtagcagaagagcgtgacgtatagttgtggcctgcgtataagaagatatcggcaatgaccttgtgcgctggataagaaaagttgcagttaaaaaatatttattttgtaatgatgctgtggtgtgattgctgagcatacgattagcgggatgattaagaggggctagatggaaagtttaatttcttcgatatggaattttgatggactgataaatatcgcgttaatttttgttacttttggtttattaggagtgtttatctggaaacgggcaggatccgcatattctttattgaaccggctatgggagttctgcctgggagggaaaacgtttcacgacggtaaaataaatgcatatttcaatgagagaaatgatgttgaacgttttaatgttttatttaatgtcggcgcaagaaataaagaagagatcaagtcactgattaactggacgaaaaagaaaaatatagatattcgtcatgtcacagccgcgaaaggatggtttgaaatatcaacgcttaaggcaataaaaccattatttatcgctaatgttggtgtatttgtctcttgtgtgttaactatgctgctattatcaaattttatgttgctggcattgaagccatccgcactagtacgattaggcgacgacaagtcatgggtttggattaatgatcatattgctgagagttcgatctggaccaataattaccttcccctgaactggactgagtggaagctcgataaaaaacagtgtgaaagtgaagatttcgataaaacggttttctcagaaaaagcggggataagtgtgcgctcggttgacaggatttgtgagaacttttcaagtggttcgttgagtgatactataaataatattattaaaaatcaaaaactggcatgggttttggctatttaccccttcatctttacgattatttgcttttttagcttgttacgcagaggtgctgcttctaaactttataatgaagtacataactcacaaaattaatatttatataaattcatttccgtctggcattactgtttgcatcgatcggaattaaatgacaggtccgagtacagaagctgtcaccggccgctaccggttgcctgctgcctgcaggcaacctcagctacattcgcaatgtatcaatgaccgctctcagcgcgggcgacacattgcggtgcgggtaatagagaaatgaaccttccagacgctggctataacgctggagcacccggataagtgtgccctgggctagatcgtcggtaatcagctcttccgggacataggccagccccagaccgagcctcgccgctttggcctccatatagctatcggcgaaagcccactgtccctgaggtgggtgggtgatttttttgccatccacattaagttcccaggcgtaaaggctgccgtcgccgaactgataagcgatgcaggggtgggcgactaaatcggcgggcgtttgtggaaagccgtagcggcgaaaatgttccggtgtacccaccaccgccatctccatatcgggcgaaatgcgtaccgcaatcatgccgcttccgacttccgggcccagacgtacgcccgcatcaaatcgctgcgcaataatatcgacaaaccggctttcgctgatcagttccagtctgatatcgggatagcgttgtttaaatactgccagcttcggcagcaggactttatcaatggcatgctggctggcattgatgcgtaccgtaccggagggcgtttgacgatagtgggccagcgtggcgagtcccatatctaaggcgtcgaaaccggattcgacattgtgatagagctgctcacccgcctgagtgagcgacaaccggcgggtggtacgcaccagaagctgaacgcccagccgctcttcaagttcacgaaccgcacggcttacaccggactgcgccaggccaagtcgttgcgctgcggcggtaaaactgccttcccgcaccacctgcataaacagataaaggtcattatagttttcccgtttcgccattatcctgcctcgtcacccagatgccatttagaacaatatggtattaattttagcatttttcagcctctaatcagaaccattactgctggctacactaagcgcacgacaacaaagcacagcagcgttgtctactgaagacttgcattgatcacgtttatttaggggaattttgatgacggttttcaccaaaaaactgacagccgcgatacccgccatgctgctttgcgcctcattaactggagtcacaacgatgagctctgctgagacaactaacccgaatgcgcctgtttcactgattgaaaaatgggacaaaacttttgctgagagttcgaaagtggatcaccgtaaggtgaccttccagaaccgctacgggataaccttagttggcgatctctacctgccgaaggatcgcggtgaacgcaaactggcagctattgccgtgagcggtcccttcggcgcggtaaaagagcagtccagcggcctgtatgcccagacgctggccgaacaggggtttgtcaccctggcgtttgacccatcctatacgggcgaaagcggtggctacccacgcaacgtggcctcaccggatatcaataccgaggattttagtgccgcggtggactttctgggcctgcaaaaagaggtggatcgcaaccgtatcggtttgctcggcatttgtggctggggcggtatggccctgaacgacgcggcgatggatacacgcgtcaaagcggtggcgaccagcgtaatgtatgacatgagccgcgcgatggggcatggagtgggtgatggcaaagaccgctataccactgccgatcgtcgcgccgtactgcgctatctgaacgtgcagcgctggaaagatgcggcaaacggcaccttcgtccccggtgggcatgacatttatgttgatgataagggcaacgtcagcgctgccgatcgtattttgccggaaaccttgcccgccaaccccaacccggtcctgaaagagttcttcgattattaccgtatgccgcgtggtttccatccgcgttcggttaattcaaccggggcctggaatgcgacgatgccgctgtcgtttatgaatatgccgctgctgagttacgccagcgaagtgactattccgacgcttatcgtgaccggcgaaaaagcccattcacgctattttgccgaagatgcctttaaggccatcggcagtaaagagaaagcgctggtgattgtcccaggcgcaaaccacgtcgatctctatgacaacgtcgcgggcaaaattccctttgcgacgttcgcgcaattttttaaaaccaacctgaaatagatctcctgtgccggagacatccccaaagccgccacgcgcctgcgggcggctttgtcttgtcggagagaaataatgtctgcattaggtcacacccgggcacactggagcggcgtcctggcgatgacgctctgcgtatttgtgctcattgcctcagaatttatgccggtcagtctgttgacacccatcgcgggtgatttacacattaccgagggattagccggtcagggcattgcgctttctggcgcgctggcggtactgaccagcctgacgatatcccgtcttaccggatcgctggaccgtaaatggctgctgctggggctcacggcgttgatggcagcctctggggtgattattgccctggcgtccagtttcccggtttatatgctgggcagagcgctcattgggatcgtcatcggcggcttctggtcgatgtcggcggcaacggccattcggctggtgccgcaacgccaggtcccccgcgcactggccatctttaacggcggcaacgcgctggccaccgttgtggcagcgccgctgggcagctacctgggggccaccgtcggctggcgcggcgcctttttatatcttgtcccgctggcggtgctggccttcgtctggcaatgcattagcctgccgtcgatgaaaagtccgcgcgcaccacagcggcagggatcggtgctgcgtctgttccgtctttctacgctatccctgggattgctggcctgcggactgttctttatgggacagtttaccttatttacctatgtgcgaccgtttctggagacggtgacccaggtcagtccttctggtctgtccctgatattgctgacaatgggtatcgccggttttatcggcacgctgcttattacgaccgttctgaatgcccgattttatccgacgctggtggctatcccgttgttaatggccgcaattgccggaacgcttctgctggccggacaccacacgggatcggtcgccgtactgttaagcctgtggggcctgctggcgacggcggcgcccaccggctggtggacatggattgcgcggacgctgcccgaggatgcggagacgggcggcgggctgatggtcgccgtgatccagctatcgatagccctcgggtcaacggtaggcggcctggtgtttgatagtctgggatggcacagcacttttgcactgagcggtctgttactgctgggcgcggcaggggggacttttctgctctctgtcaaaatcagatcatctcagcgcactgcgattaatgaattgaatgcataagtcaaatcaggaatgacaggctaatcgtgaccgcgttcctgtcttaccatggtgttttaacaagaggggagcttcaccgtggaatattcagtattaagtaacgctcgcaaaatgccgatgctgggtttcggcgttttcaaggtgaccgataaagcggagtgtaagcaggcggtgttgaacgccattcgcaccggttatcgcctcatcgataccgctgccgtctacgataatgaagatgcggtgggtgaggccgtgcgcgaagccatcgccgaaggtttgtgtacccgcgaggcgctgtttattacctccaaactgtgggtccaggacatggccaacaccgggatggcgaaagccgggattgccgcgtcattaaaaaaatcgggcctggaatactttgatctttatttgctacatcaggcgatgggcgattatttcagcgcctggcgtgcgctggaagaggcctatgaggccggtaccctgaaagcgatcggcgtctccaatttttacccccatgtgttagctaacttctgcgaaactgtcagaattaaaccaatggtgaaccaggttgaactgcatccttatttcgcgcagcccgcggcgctggaagccatgaagcattatcacgttcagcctgaagcgtgggcgccgttaggcggtggcagacataatccgtatcaagatgcattgcttcgggggatcgccgatgcgcaccagaaaaccattgcgcaggttgttctgcgctggaacgtgcagcgtggcgtcacggtgatccctaaatccacccgccaggagcgcattgaagaaaattttgctatctgggatttcgtattaacagataacgaaatggcgcaaatcagcgccctggatttaggctatgttggcgaagcggtaaaacacttcaaccctgagttcgttcgcggatgtctgggggtgaaaatccacgactgaccgcggcaccgattggctccatcttcatctccccgcctgcgccgcggcgacgggctcggtatgctggttagcacccacgtgtttgccgcgacggttgtcaatgcggtagtcgatcgtcacgggcagctgactggtgacagttgatcctctggccggtgacatgtcggttggatgcttccgtcgcagtggcctttaaagcggcagtctcccgggaaattttcgctgccaatgaccgcgtgacgctgcgctttatcgatgcgggagagatctttcctgccgaacgcctggcgctggcgcgtaacgatgagcactttgatgtcgatccgttagcggaaggcggcaggggcttgcggcttattctgcgtgcggtggactattttaatgtggaaactggcgccggggagaacgtgactaccctgatagaagcgttgcctgatacccgcctaagccatgccaccgacgatcgctgcgggtgagggaacagatgttgcccccgggcgaatcaccggggaaatttccccacccgcgttcaccggcttcatcatcttattgctgtgcctgggcagcggagtgcacgcccaggtgatgaggacggatggtatctaatgtcatcatggctgatttgcagaaaatgcatttcgcaccaaaagggtttttttcagtgacgtcaaactgggacgttctgtactgggagccatggcagcatgggcatctaaaatggatatgttcgatcataatgtaaaccttgtatgggtgatgttctgttgaaaagacaatggtcgtttcaggaaaattaacgcggctgattttagttggtggtaagccgggttttgggtcagatggcggacattttaaggagccgacaaggatctgacagggcctgtttacagaaaaagcaaactactaacgggactgctcaaaggaaggtggtatcagggataacgcctggagatgagaacaagtactcagataataactttttgtctggtaaatcgactcaacgattaacgcacgtgccgtgaataatagcaaacgttattttagccttccggatgcctgctgcgccaggtgaggcttcatcagcgccgtcacccagtcgataaatacctgtacccgggcagagagctgccgattactgggatagagcagggagagcggcagcggcgcagggcgaaaatcggccagcacttccgttaacgcgcccgacgccagatcggcctcaaggcggggcaagggcgcctgatacaggccaaagccaagccttgccgcttcggcgccgacgtcggcatcggaagtcagcaaccgacagggcaaactgacctcgctctgacggccatcctgggtaaagctcagcggcaaggtacgttgcgtgcgcgatgaaacaaacccgatcatcacgtggcccgtcagtccttcaatcgtatgcggggtgccgtaccgggcgaggtaggccggactggcgcaggtgatctcctgcaacccggcgagcggccggcagatcatctcgctgtcggggagatggccgccgcgaatgacgcagtcgactccctcgcgaaccagatcgacgtcacgctcgctttcgccgatctgcagcgtaatgtccgggtagcgggcgagaaactgtggcagcgcgggcagcagcagggtccgcgccaggttgcccgccacgtctacccgaatggtgccggagatgctccccccggcgctgcggttggcctcctcaagggccgccagaatggacacgcagcgctgataatacagcgagccttctgccgtcggccgtacgtgccgggtcgtacgatgtagcagccgcgccccgagactgacctccaacgctttaatagccgcggtcgctactggccgggaaacccccagatccgcggcggcggcactgaatgagccccgttcgacgatgcgcacaaacaaggtcagagtatccagtttatccatgacattgttccagctggcaaaactatcctgtcgcccaacgcggtcttatcgtcggcattcaggggcttataatcgctcatgttttcagcagagagaaaaggagaaaacatgaacaatagcgcaaaaatcgccctggtgacaggtggcagccgcggcctgggacgcgcgaccgtcgaagcgctggcacagcgcggcgtaaatgtagtactgacctacaaaacgcgtcttgccgaggcgaacgaggtggttacacgggttgaagcactgggcgcccgggcgatcgcgttgcctttcagcgccggcgaaatcgacacctttgacgcatttgttagcgcttttcagggcgcgctgacggagctgggcgccgataaatttgattatctggtcaataatgccggcaacgccagcggcatgggatttcttaacgccacggaagcggaattcgatgcgctgtattgcatccacgtgaagagcgttttcttcctcagccaaaaactattgccgctgctggccgatggcgggcgaatagtgaatgtctcgtccggcctcacccgcatcgtgatggcgaaccgggcgccctatgcgatcatgaaatccgcggtggaaaccctgactcgctatatggcgtttgagctgggcagtcgcgggatcacggtgaactgcgtggcgcccggcgccatcgccaccgatttcagcggcggggtggtgcgggataacccgcaggtcgctcaggcggtagcgaacatgacggcgctgggccgacctggcctgccagaggatatcgggccgatgatcgcctcgctgttatccgatgatcatcgctgggtgaatgcccagcgcattgaggtttccgggggaatgcgcatctgagcgaagaaaaccggggctgttttcatccgtagtcaatcgatatgtcagtggatgccgatatagcgcaacgctgtggagagataaggaaataatgatctgccgcgttgctcgttaaatattagtgattgaccttattgcctgaatgcgcaagattattgttgaataaacagtcaatatgctaaatatatttaatgcacgtatgaaaggatttaagatatggattttgaaaatgaattgaccagtaagatccttgatcccattcacggcactattcgtttgacgacactcgagattgcctttatcaatcaccccctgttccagcgcttacgcaacattaaacagaactcttttttatataaggtgtttccctctgcggtgcacagccgcttcgaacactctctcggggtgctgcatttatcaagtgaaatactcaataatttacgcctgaatgcgatacggtatcaaaagaaatatgatgatggccatgtgtttggtcatatcgatcagataccaaaacacaacattcaggagttgagactcgctgccctgatgcatgacatcgggcacgggccggtatcccaccagtttgagagttttatgccttgtaagcacgaattctccgatgttctccccacggcctaccattcaatcattgatgtattaagcaagccagaacagaaagttgaacatgaacatctttcgctgttgttcagcctgatgatttatcatgatctgagaaaacaaggtaaggtcgatgacgaaataaatatcgaaaatgtgttaaaaattatcgaaaaaagatacggtgaccaacagatcattgaggaaattaatggaaaggcaacagatatcctgccgttaatgacctcgatcatctcttcctgtccgatcgatgccgaccggatggattacttgctcagagatggctatttctccggcgtcaagtgtggcatctacgattacaatcgcttgtttatgtcaattgtcccggtcgaggaacagggaaaattgtaccttgcttacaaagagagtgggattgattcgatcgctgagtttattggggcgcgctccagccttttttcgcaggtatattaccataaaacaaaccgcgcctttgcgacgatgttgagcacattatgtgagattatgcaaagcaaggatccacaaaatgtcattatcgctgacgttaccgaccgtatcgttgaccatagcgatgaaagcttcatcgacgcgctgaaggatttttatctggcgtgcagtgatgattattttttgaatgacaaggttggtgaatggatagatatcagcgataccgaggcggttaataaaaaaatacttgatgacattattaaccgacacccatggtcgaaggtctatgaggccaaacactctgtgtataaagctaacatcgctgacaaggaaaataaggcgtggaagagtcaactcaccgggttattgacttctgtattacagcctcatttcaaaccacatgaatttgccgttgatattgtctccgactgcgcctttaaagacttggataaaaccgaagttaagcttttggtgaaagatcttaagaaccgctacgaaataaaaccgttaattgaatgtggtgataagttaaatcagtatcaaatcatcaaatattgcattcgggtatttgttgaccgcgatatcaaagaacgcgtaactcctgaaataatctataaaatcaatgaaatagtggtcaagcagatcgcgttgctgaattgatgatgcccgtcagggcagcgataaatctatcaggggctggttttttaaccggcccctgaagataagcggtaaatcgtggcgcatccccgccatcggcataacatacaacagcgcgtttacccgagactaaacaccgcgctgaggcatagattcccgcaggggagcgggtggctcaataaaaacgccggctcagtatggttattccgccagcagggcggcgaatttcgccagccactgtggatgagccggccaggcgggggcggtaaccaggttaccgtccacatgcgcctggtcgatacctatatccgcatagtgcccaccgctcaggcgcacttccggagcgcaggcgggataggcgctgcaggtccgtccctgcagaataccggcggcggccagcagctgtgggccatggcagacggcggcgataggtttacgcgcggcgtcgaaggcctgtaccagtttaataacctcctcgttcaggcgcagatactccggcgcccggccgccggggatcactagcgcatcgtagttctcggcctttactgcggcgaagtcagcgttcagcgtgaagcgatggcccggcttttcgctataagtctgggcgccgtcaaagtcatggattgcggtcatgacatagtcgccagcggctttatccgggcagacggcatcgacctggtgtccaatcatctgcagtgcctgaaaaggaaccatcgtttcgtaatcttcggcaaggtgtgggctttgcacatggttgagattgttcagacaagaatgaatacggttagatgtttatgtatatgattttttattattattttagttgtgctgccaattgttgcgcatggttgtacatgatttgatattgttgtttatgttcgttcatgcgatattgagtacagaataagtacataaaataccaaagtgatgagtacagaaaactaacatggcaatcagtgacacaaagcttcgctctatctatggtaaaccatattctgggcctgctgaaattacggattctgacgggcttggagttcgcataacccccaaaggcgtgatcagctttcagtttaggttccgatgggaaggaaagcagaaccgaatggggcttggacgctacccagcgctgacgctgcgcgatgcccgcaatatcgttgcagacctgagggagtcggcagacaaaggcattgacccccgaacgctggctggtggcaacaaatccaagagtaagccaacggtaaaggattgcctggattactggaaggaaaattacgttgacgtaacgttaagggctaagacgatagcgctttataagtcaacggttataaagcacatgcgtgacgcttttcccggtattccggttgaggatatcccagtccgcttgtgggttgagaggtttaccgaagaggagaaaatcaatcctcgccgagcccggcatttattgatacagctcaggtccgccattggttggtgtacgcggcgacagttcgttagcacaaccgagctcatgcttttgcagccgaaagacatcggtgttaaacctgtgattggagagaccacactcagctataaccagcttgccaaaatttggatggctatagaaagaagtcgagggtcaacttctaaccgattgcttcatcaattgctaatgctgtacggcgccaggaatagcgaacttcggctggctataaggggtgaatttgaccgagaggaggggttatgggttgttccggcagagaaaagcaaaaccaacaaaattatcaggcgcccaattttctccgcggcagatgatttgctgaaaaaagctgaaatgacgtatggggatatacttttcccgggcgaggacctgaaaagccctataactatttctggtgcaaataaatttctgagaagaatcaaagactcgttggggtttggtgagtttacttcacatgatttccggcgcaccttggcaacccggctatccgaagagggggttgccccgcacgtcatcgaaaaaatgctggggcatgagcttggtggcgtgctttctgtctataacaagcatgactggattgccgaacagaaagacgcctacgatctgtatgctgaaaagatattctggcatatcaggaagatttctggttgactcccccgtttaagatccactccacaatagcagagcgcagatactgtttagggtaggtccggaccggcttggggaaattatagcgctcggtgtatttccggatggtcacgcgtgaagatactcggatcatccgcatcgcctcttcctcgtcaatcatttcaatgtctaccatattactcacctcacaccacttccaggccacggcagtggcaccacacttcatacatccgcttaactacttcccggctgtagtagccgtgaccgtctcgcgttaggtcatagcggccgccgtagcgcagtctgatccatatctcaaattctctattcatgacactaactccgaaacagccaggctatggcaaacgcacaaccgacgatgcaaaatgctgttggccagtccattacattgtctccccaataatttcaatacccgcagaaatcagagcggccgcacatgcttcgcgcatgcttcctgcaccagcagcaaatccctgataccattcggcgttagatccgagctgcggcagtcccggaagcttcacctgcacagctgtttttgcttgggtaccaaaacccagtttttcccgaagttcaacgatagcggcatcatgctctgcgcgggcctctggacccatggcatccaattcagcgtaacgtttagccctgttgttaagtgctcgcagaaccaggtgagtgccaacgcctttgccaaaccggaagccgggttcaagaatgaccgggcaggggagtgtttcagggtattccggccgcaatgtttctttagaattcgccagaagctcaagagccatcgcaaccacctcgcccgggaagaaaggttcaccgccggcgattcttttaagccgtttttcgcagattgtcattcagctgtctcctgttcagcttcgatgatggcatccacagccatcatcagagttctggcgaggtcgtcgtaatccgtccaagcatcgttgctgaagaagttcgtgatcataactggtgcaatttttgcgataagatactgacgataagtcataccaccaggcgttgcgttgcttggatttgggtatgcataatgctggccgtttctcattgcttagcctcccggatcagatgtttataggcccgcagcgcgtgatgtgtcttcccgcttaagatcgttttcataatgaaaaaaccgctgctctggctggtaatttcaggcgtgaggaacaacgcgacatcaatcgcccggttgtgccggcggaactcaaacacggtgctggtgaccgtgataactgaaaccgacccttgatcattaaactcaattttcacaatgtttttcctcccatccgatagcctgaaagagtcccattttcgggtgataccaacgggtcccacgtggttcggcttctgccatcatttggcggaatgctttcataaaaggttcaaactccacgatcgcccggcgagacagtaaaccatcaggcgtcatgaattcgtgtgtatcggttgggatacggtatgcgttaacaaggtttcgacacttggcatcggtcatgccgctttttgcgaccacctggcgataaccgacatacccggcccgcatatttccacgcttaatgttttcgacagcttcgactacggtttccacctgttcttcaacctggtagaggcgtcgttcctgctcaacattcagcagggccatttcagcgatcagctctgcctgcgattttggccgggagcgttcttcttccagctctttccagcgatctaccagtctggcggtaaactcggggctgagttgcgcgaccacaatgatgctgtcacgcttcccttcttcactttcaaaaacgtaaattgttgtggggcgcccggcagtaggcttttcctcaatttgaggagaagtaataacgccacgcataatcagggtctcaatcgtgcgtttcacgttgtcgtggcgtttttctaccagctcggcgatctcaaggctggtcatggatggtttgttagtgatcaagttattcatcatcattcccctcaatgcataatcggtgcttcgggcacaccttcgatctggatgtgttcgataaagctgtcatggaggaggttaagcccctcccggccaagtgctgataacctgaacccaaattcttcgtcagcaataaccatgtcctgatacatccgcagcgccagctgctggccaacctctggcccatatttctcgattgcccccagctcaatatggttggcgagtgcaaagcgttcaggtcccggatagacgctaatggcgccatgcttgctggaatagataacagcagtatcaacaccgccagtatcattcggaacgtcgacagttccgtttttctccagctcctcagtgatgaacacggcagccagtaaccagcgccagaggatcaactctttttcgatattgagcgtgatccagttgctttctaccgcttccatgatgcaggccagaatttccattccatcggcaaggtgtttgtcatagcgaccgttatccagcaggcgaatagcagcggagtagccaatcacccggtttccagaccggatccctgttgaggttggttccgggttaagcatgttctgaagcattgcgaacctctcatatgtgcccggcttgtcgccgggctggtggatcatttaacctggataaaaggggtgtttgttccgctggtcatgtactggggcagggtgccattccatttgttgatggcctccagttgcagtacctcagggttctcacgcaaggcctgcccacggatctggatagactttgcttctgcttcagccaatttcagctttgcatccgcctggccatcggcttcggctcgtaacatgttggcttcagcttcacgttgtttaacttcctgctcgcgctgcagcgtcttctggttggccgtaactttggcgttgatgctttcgatcactgtcggcgggtattccggacggccaacgtaagaaaggctgatcacctggataccaaccggccccatatcggactggatctctttcagtgcgttttcaagcagctcagctttcccgccgtcaatgaatttatcggtgctcatccgacttgcgagacgattaagggcgtcagcaattttctgccgcaggtcggtgtcggtgatgtcgtccacgcctttacggtaggtctggaaaacggttgtaactttggtcggatcaaccttgtacgcgaccccgatgtggtagccgatggtggttccatcgctcatctggaagttgaaagcgtcttcatacgttttcatctgcttgaaggtcggaaagatataaacctcggtattccagccggtccagtagcggccgacgccgacgacttcaccaacgcctttatcgtcgcccaacttattcaccttgatacccacgttgccgggctcaactcgatcgcaaccaacaaggccgatggcagagagtgcgataattgaagccataattgcttttttcatttcttttccttcgttacggtaagcacaagacccttacaaatggcgtagatgcacggcggggtcagaatcgccagggcaaaaccggatataactgctgtcgtgtccttcatcgaaatgaggatcggaacgaacagcccataaacgctggcgacaatcaccaccgatagaacaatgcgtaagtaagcaatcatcgactcagccctccaggcttacaggcctgtagttcttcgcgctctttcacgtagcggtcgtgcatggcatcccactttttgcaccacttttgcatttctcttttgcgggcgaggatgcgacgcagccggcgaacggtgcgctggtgggcgttaaaatactcagtggtcacggcgccacgttgccagctactcagttctggattcagtggatgaattacctgcacgtccggataacgctgcttgaaaccagaacgcccaaaagctcgggaggtcatgaagaacgccaggtaacgaattgcggtatcccggctgaagcaccgcttcatgcgtccgtggcggatcgcggcgaacagatcaccaactggcgttgggtgcttttgcaacgccaggtcaatggcgctgacagttctgttgtcaatcatttgtctttctcccggttataggtttcatgactcataacttcccagttccggccatcgtctttcgataacaggcgccagcgtgggttaaccttcaggctgaggtagccggtgcggcgcattcgccgcgggaatatccgccggcgccgataccgcagcaggacctgcagcgcctgcaggtgaaccctctcaggaattcgtatcgctgtcagtgccaccagcttcctcctcgatcctcaaccccgcgtcgcgggccatttcgataaacgtggccagtgtgcaaatgtgctcgtcgtcgaacagctggcggtcgcatatcaccctcccgttctcgatgtgcaagactacccgcccggtaaaatcagggaggacatgcagatccacgttcaacacggggcgggggatcagcacaccctgatagagcattgtttgctggttattcattgccggactccgcagtaactggtttctgctttttgacgaactcaaccagttcagaaataagctcgtcgattaactctttcccgctttctgtgaggaattcgccgctgccattaacatcaacagagttgctgtaaattcccttaagagctttcacaccttccacatttccgtattcaccgagcgccagtcgctcgaatttccgcaacaatccatcaagaagaatctcagttaattcgatagtactaatcccacccttgttgagcttaatgacaagtaagctactcccagtctttcgctggtggcgtaacaaggccgcttttaaaattctgcgtctataagtgctaattaaattattcacttttatttaccgtaagccttttttaaataaagcatggctatagaccaataaccaagagagacaaataactgagctgttttaaatgcttgtttattaatcatggttacccttaatttgattgcagaaatccccgggattactcctgtaattaaaattactaattaaatttttaagccgggtttttagactcttcctcaataaggtacgctgcaactggcccaatcagatcagccaaaagtgaggcgacagattccacgtctgagtcggtcagtttatgagggtagttctcaagcatcctcgccacaatctcagcctggtaagcctttgatgctgctttttgcaaagtgatatcagacatttttagcatccttataaccggaagaatatgttgctgagttagctattttatttgttgctattgctaattcagcgaggtctgcaaccacactagaaagcatcattattttatctttatttaatctcttttcttctgcctcactcattatgctaacccctatatgattgatggcttgcaaaatagatattgtttttgtatcgcaatcagtagcaattttgtcgaaatcaatgttttgacattgctctttatcggaagagaaacggtaatcaggtatagttaccagttgaaaaaatttctctgtactcatcttttgcactccattaatccgctaatgcataaacaatacataacgtattaaataagatcaatacaaaatggagtattttggtgtgttatttcacatcattttgtttttcaaggttttttagtttctggtggggtgttggaggcaaaaaaaaagccgctttcgcggccaatttatgggaggttggtgatttttgcgtcgactacaaccccgataatacggcaattgccattgatagggattattgggtattgggggttgaggggtttgagaaatctttgaccggcatcgataacaagctttttgaaagtggcttcattgtcaccgtcaagtttcgctacaaccaattttccgttgattgcttccacttggggatcgacaagtatcgccatcccttccggtatgctcagccctgctggtgatgtcatggaatcgcctctgacgtctaaccagaacgaatcctcagagcattcaacggtggtgtcataccatcgatctatcgctctacggtggtacggttctacagcttccatccaatctccagcgctaacccagcttataacagggtagcttcccttggattcgttaatgctattaaaacttacattgtgatcggctcttgagtcgctgatagtgccgtcagcatttactacgaagccgggcattttcaatatgttaaaaatcttagctataacctctaagttcggttcacgtctggcgtttaaccaatggcccagcccgccctgcgttatgccgagcgcctctgccagctgttcttgagtcatgccgacttctttcatcctggttttggccaggtcctgccatctctgtttcatagccatgattattacattccgtatttactgagcaacttccattttgtattattcttgtgaccgtgtatagtacgttatgtattatttatgcgagactaatcgaatgagtggaatcaagagccttagacgcaaagcaaaggtaactcagggagagctggccgcgctgattgatagctcccagggggccgttagccactacgaaacaggaagaaggattcctgatgttgcagtcggaaagcggatcgtcagcgcgtttaaacagcttggcctgaatacaagtttggacgaggtattttcagatgatgttgcacgggatgaggcctgaccacggtttgctcccatctgtgtacgcatctgcagatgaagaatggatcaagcagcagttactgagcctgacgccagcagcacgacaaaaagccattcagcgttatgcagctgtgtatcaggaatcgttcgaagccgagcccgttccataccgcaaggagaaccgggcaaggcatgaagccaatgtgaggcttcgcagattcgtggatgcacacggacgcgcactgcaggggtatacgacccagccacccctggccggatctcagtaacgatccgttggtcaccgggcttaaaggtgccgggtgatagcagggaacaatccttgactgttttttgttctttgtaccagcttgcgagtacatgggatggggaagagggaagaggggggttgggggagttgggagttagggcaggaatagcgtccttttccaacagacaggtacatgggttaggtaggtaccgatcttgaaggcagaaccataaaagagcggcgcactagcaaactggtacacggtatcccggcaagaggtcaggaatgtttcttcctggaagagtagaactcaaaaagggctgacaatgcttaacatcacaccgaactttgcacaggaacgtgggcttaacatgctgcggcgcacctggaaggcgcacgattccttcatggtctacgcaccgaccggaagcggcaaaacaggcctggctgcgtttatcgccgccggcctggttagtcgtggtatgcgtgttctgtttgtcgccccgtatacgatcctgattaaccagaccgcccagcgctttacagaatacgggttgccggaagaccagattagttttatctggcgtgatcacccgaactacgacccaaatctgctgatccagattgcgagcgctgacacgctcattaggcgtgaatttcccaaaaacatcgatctgcttattgtcgatgaggcgcacctgcgtaaacgccgtatcctgaaagaaatcgaacggatcacagcggagaaaaaagcgaaggttatcggtttatctggtaccccttttgcgccgttcctgggccattactatcaacacctgattaagccaacgacgattggcgaattgatccagcgtggtgacctcagtaagtacgaatttttcgccccaacaaaaccggatcttagcggggtagaaacgaagccatctatagagttcggtactgattacgacgagtcccagctggcggaaatcatgtgcggttctgacctggtgggcgatatcgtcgataactggcttcgtcatggtcgtgaccttcctacggtggcgttctgcgttaacaaggcccacgcaaactttgtaaccatgcagtttaacaaggcgggcattaacgctgaggtgatggtcgcagaaacaccccacgaagaacggcaggcgatgatccaccgcttcgagactggcgccacaaaaataatcgtcagtgtgggtgtgctggtggccggttttgatagtgatgttcgctgcattatctacgcccgtccgacaaaaagtgaaattcgctggctgcaggcgctgggccgcggactgcgaactgcacccgggaaagatgcctgcctgatttttgatcacagtggcactgtgcatcgcctcggcttccctgactccatcgaatacgacgatctgccatccacaaacgacggcatgaaagcggccgctgccggcgcaactaaggagcgcgaagaaaaacttccgaaagaatgccccgaatgtcatttcatgaagccatccggcgtttacgtctgcccaaagtgcggatttaaaccgctcgttggtcaggacgtcgagactgacggcacccgcaacatcaaaaaaatgagcaagcacgaaacggtttataccaaaagcgacaagcagtcctggtggagtcagatcaagttttaccagcgtcatcgtgcggcgcaggggaaacctgtcagcgatggctggtgtgctcatacctttcaggagaaattcggcgaatggcccaacggcttaagcgactttccaatggagatcacaccggaggtcagcaatcacatcaaacacaaacttatcaaatttgctaaacgccgcgaacgcctgcagcagatggggaagaaacctgaccaggatctatttccacctccgagcgccagtatcaactatgagcctcctgagggcagcgacgggcaattaattatcgaagcaaaacgaaaactccagaaaaacgtaaatagtgcgagtcagtgatatgaaaacagcagaagcagcaaaaggccggtggtcagaaatttttgaatattacgggctgccgcctatcaccgggaaaaaccattacaagggagaatgtccggtctgtaaggcgcgggggaagtatcgcgttgatgaccgtgacggtcagggtacatggatctgtgtatgcggtagcggtgacgggatgaagctgctgaccctgacccagtcaaaaagcttttccgccatctgcgcagaagtggaccagctcatcgggaataactatcagcgcatcaacgtgccttctaacagttcggcggcgcggcagcgccagcgagtcatcagtaagttttccaagttgctcgatttacggggaactagcgcggctggttaccttcttcaacgtgggataagtcgcctgccggcagaaggcatccgtttttgtgaccgccaacgccatgcggggcgcgtttatcaagctctgtatgccctggctaccgatgacaaagctgagctttgttacctgcaccagacgctgctggacggcgacaggaaggcagatattgatagcgccaaacgtcttaagtcgcttcaagaggacagctatctggatcacgcccgctctgtggccattcgcatgtttccggtatcaacgacgatcggcattgccgaaggtatcgaaacagcactctcctgttatcaggtttatggcgtcaacacctgggcggtaatcaacagcgggtttatgaagaaattccgggtcccggcaggtgtgaagcatctgattatttttgccgacatggacaagcactctgcaactggacatgccgcggcgttcgagtgcgcccacgcaaacctgctggcgaaaaacgacctggtgaaagtcagcatacgctggccggataacggagatttcaatgatatgcttatgaacggcgatcaggttcgtgaacaagttttctataaaaaggtggcagcatgatgaacaataacaatctgcaacataaccaattcttcaccatcgaacaggacttttcgcctgagaaaattactgatgctgagcgccttgttatggagcgcttcagtcatatttatgcaaactgggccgatgaaaaaaacttaagtcgtgaggcggaagaacttcgcgtaagagaaattaaaggttttaaaaacatcctcctctctccctggacattaagcgatgtaaccattgaatgggattactgggaatccgtacttcgtcacaggtataaaacacaaaatggcgatggctacgtccagattatctgggatcggcgcgggtggctcactgaccttttgtgcgccatgaaaccagttacccgggctgaagcattaacagtctgcaagtggttactggcatgtgactattttgaggaacgggattcgctgtttgatcgcattattttgaacctggtcggggagtgcgaagaatgaaactggaagcctccctcaaacactttagccctcagggcatgcatatcaccgacgacgcgaaaagcacatccccgaatcgcctgaatggcacagacattatgaccgggatcggtgtgaccagcagcagggcacgcttcggcctggccgctttcttcggaaaggctggtatcagcaaaacggatgaacagcttgcaattcaggcgctggcgcagtttgccatcaaaaacgctcctaaaaatgtccgcaaagccgccggtgacaagctcggcacctgcatgttgacgctggcacaatttgcttttgcggagtactcacgttcggcggccaccagcgcaacgtgtcacagctgcagcggaaccggctttatttccagccatgaagatgtaattaagcaccctggtattttcgatgcagacggtgtcgaggtgaaggccccaaagattagaaatgaactggtgaaaagggtctgtggagtgtgtggaggaaagaaagtgatccatgcgcgatgcaggtgtggtggtaaaggggaggtgttagatcgcaaagcgaccaaagaacttggcgcaccggttttcaaaacatgtgagcgctgctctggaaatggcttctctgttgtaccctcagcgacggttcaccgcgccattctgaagcgtctcccggatctccatcagtcttcgtggtcacgcaactggaaaccgttctatgaggggctggtggacatgctgcgtcagggggagcgtcaggctgcagtagaatttgagaaagcgacaagttattaatatgatcggaacaaatatcggctattttttgcatgatagtattgactttgcataaaagtgtctagtatgctttcaatcgtgggatataacgcccgtacgaaattaaaacatgaaacctcgcttcggcggggttttttgtttctggcgactgaaaagttggccgactggaagacctccattgaggccgcgctctggatgggcgcgttgtcaaaagcgggttagcgtccaacgagcgacaattaaattttacccgcgacaattacaggctgcgcatttgcgtggcctttttcatttcaggctcacgggaatcatcatcgacacgcttcgttgttaaatccagcccgacggccctgaaccttttactgactacagatagcaccccgaacattatcggaggtggagactatgaaaatgcctgacaaaatcttttcggcggcctcgtactgctcgtcaggcggcctgatatgcaccgggctggcaaggacctatgactggtttcatggccttgactggaattttattgccctggccagtggcgtgataatcggtgtagcgacttatctgaccaatctctactttaagcgccgctggacgaagatgtatcagcaatccctcgatcgtggctatggtggcccgccaccgcaggatgaatagcgatggctaacctgaaaacgaaactcagttcggccatgctggcgcttatcgctgctggcgcttcagctcccgttcttatggaccagttcctgaatgagaaagagggcaaaagcctcacgtcataccgcgatggcgccggcatatggacgatatgtcgtggagttacccaggtagatggaagacctgtaacccagggaatgaagttaacccaggccaaatgcgatcaggttaatgccgtcgagcgcaataaggcgctggcatgggtagatcagaatgtgcgtgttcctctgacaccccctcaaaaggtcgggattgccagtttctgcccctataacatcgggcccggtaaatgctttccttccaccttctaccgcaagctgaatgccggtgaccggaaaggcgcctgcgctgaaattcgccggtggatttttgatggcggaaaagattgccgcgtgcgttcgaacaattgttacggccaggtctctcgtcgtgatcaggaaagcgcactggcatgttgggggatagatgaatgagccgattagcagccattatcagcgctgttgtgatctgcctgatggtttgccttgggtggctggtaatgcattaccacaacgctgctgctgagcagaaaacccgagccgatggcgccgagcagcaggtaaacagcactcaggccatcacagccaacgttcttaccaccatgaccatattcaattccatcgcggaggccaacaaaaatgccaaagagcagatcgcactggacgcatcgggagccgcggcggatatcaaagtggctgttgcgaatgatgattgcgctcccgctggtattcctgctggcgcagttaagcggttgcagcaatacaaagacagtttacgtcaccgttccggtagtgccgctaccctccagcctgacagctgaaacgccttatcctgatataccggacaagatgacgtggggccagagccttgatttaaacgtcagtctgctatcagcgctggggcagtgcaaccgggataaggccgacatacgtcggtctgaaatatttagagggaaaaattagtcatatccggcagttattaaaatgccatctttctccccgtaagtagcgtgtctataatgcctttgccgattggctacaacataaggtgtgacatgaaaaacggtatttacttcgtaaccttcagcagcaataaccatgatgttggacaaggcactgtagtagtaaaagacaatgccatcaacggtggtgatttcgggttcacttaccaaggccatattcagggcgatacattagatttgcatgtttctcagcataatcctcaggcggtgaatgtcattcaaggtgtaaatgactacacgatggaaatgagcattgtagaagtgcaggggggttaccttttatcaggggccgttaaaggaattcctcaagctcggcttagggtaagtgcaaaattcattggtgagttggtttagagagtattctttatcccaaacccgctgcggcgggtttttttatgggcattacagagccacttccagaggtggctcgataatgtcaaggcgaggacaaaattatggcaacaccggactgggaggccatcgaatcggcataccgggccggagtccttagtctccgtgatataggcgataaatacggcgttactgaaggggctatcaggaagagggctaaaaagtttgattgggtacgcaaggccagtacgcaggtacgcaaaaatggtacgcaaaagagtaaggcgcgtaccagcgaaaagcctgccagctctggccgtacgcaaccaaaagccgaacctccaccagatacgaaaccgatacgcggggtgcgtaccgatccgccgactaacccatttcaacccggcaaccagcaggcgttaaaacacggtggttatgcccgccgtcttctgcttaaagatgaggtcattgaagacgcgaaagcgttgacactcgaagacgaattatttcgccttcgggctaacaaccttgtcgccgcagagaatattggccggtggttgaccaagctggatgatgctgaaggggaccaggaaagaaaggtgctgatggaaaatatcagcgccgccgagaaggcgatgatgcgcaataccgttcgtattgagtccatcgtcggcacgcttgcgacggtaggcaaaatatttgctgatacagactatcgcaaggctgctactgataaggtgtcgctggaggccgatcgtcttcgccgtgatgctggtattgatgatggcaacggagagcgtgacctcaatgacttctactctgacatccaaaccgacgctgaatccggtcctgcgtagcttctggacgacgcaggcgcgtaacaaagtgctttatggtggccggtcatcgtcaaagtcatgggatgctgctggcatcgccatattcctgtcaaataaatacagcctgcgcttttgttgtgcgcgtcagatccagaacaaaattgaagagtcggtgtataccctgctcaaaattcagattgaccgctttggcctgcggcatcgtttccgcattctgaacaacaaaatcattaaccgggtgaccgggtctgaattcgtgttttatgggctctggcgcaacattgaagagattaagtctctggaaggtatcagcgttctgtggcttgaagaggcccacgcgctgacggagtaccagtggaagatactggagcctaccatccgtaaagagggctcagagtgctggtttatctttaaccccggactggtgactgatttcgtttggcgtaactttgtggtcgatccgccagaagatacgctgatacgcaaaatcaactacgatgaaaacccctttttgtccgacacgatgctgaaggttatcgaagccgctaagcgccgggatccggatgggtttaagcacgtctacgaaggcgtgccagagtcggatgatgatgcggccattatcaagctgtcatggattgaggcggctgttgatgcccacaaaatcctgaatttcgagccaagcgggcgtaagcgtattggcttcgacgtcgccgatagcggcgccgataagtgcgctaacgtctatcgtcacggctccgtcgtgtattgggcggatgagtggaaggcgaaagaagacgaattgctgaagagctgccagcgtacgtatcaggcagcactggagcgcgatgctgatatcgtctacgactcaatcggcgttggggcatctgctggcgcgaaattctcagaaattaatgaggatcgtaagcgcgaaaacatgaatgcatcccgcatcaattatcagcgattcaatgcaggcgctggtgtgaatgagccggactacgaatatagtgggatcccgaacaaggattttttcgccaacctcaaagcgcaagcctggtggctggtagcggatcgcttccgtaacaccttcaacgcggtaaagaacggcgagcagtacccggtagatgagctgattagcattgactcatcctgcccgctgctggaaaagctcaagctggaacttaccaccccgcaccgtgattttgacaaaaacggtcgcgtgatggtggaaagcaagaaagacctcgccaagcgtgacgtaccatcgccgaacgtggccgacgcgttcatcatggcgtttgctccaaccgatacggcaatggatatctgggaagcgctgggaaacagctaaatacctggaaataaccgtttcacgcaaaattcacgctattcatttttcgaccctgtttatgcatgttttattcacgcgcttttagccacttaaccccgataaataagcctttggcggacatttcatcatgggagggatccggctggtgcgggtaacagtcattatgttaaatcgggtcgttttttaacaaattatcctatccgccacgagtaccaaaaaagccggagaatagtcaccatggcgaagaaaacaggacgagtcgccacggcggattcgtacgataactttgttgcccgtgtcggtatgcagcagcctaatcagcatgccgcatcgacctacagggcgaactataccagccgcaaccgcctgctcatcgagtgggcttatcgttcctcctggattattggcgccgcagtcgattcgaaagcggacgatatgaccaaaaagggcgtgcggatcaccagtgagattgacccgaaacgtcgtggcattctggaatcacggttcgatgagcttcagctttgggattgcatcaacgagacgctgaaatggtcccggctgtatggcggggcggtggcactgattctgattgaaggtcaggcaccgctgacgccgctggtgctggataaggttggcaagggcagctttaaaggtctggctgtacttgaccgctggatgattaacccacagctcaccaggcgcattaaggcacttggtcctaacctcggcaagcctgaattctatgacatcgtgacaacggcgcaggggctgcctgcgtggactgttcaccacagccgcctgatccgcatggatggtgtgaaactgccgtatcagcagaaaatcaccgaaaacgaatgggggatgtccattgtcgagcgcatcttcgatcgcctgacttcctacgatagcaccagcgtcggcgccgcccagcttgcctacaaggcacatctgcgaacggcaaagattaaaaagctgcgtgaaattatcgccacaggcggtaaagcgtttgaggcgcttatcaagaatatggagatggtccgccagtaccagacgaacgagggtatgtccctgtttgattcggaggacgaatttgaaacacattcctattctttcgcagggctgtctgacctgcttagcgagtttaaagaggatatcgcgggtgctgttggcattcctcttgtccgtctgttccgccagtcaccgaagggtttttcaaccggtgacgctgacctcgcgaactactacgacgacgtgggagcgcttcaggagcgagatttacggcctcacatccgcctgttattcgatgtactgcatcgctcagagtttggcgagccgttgccgcaagatttcacctttgagtttaaccccctgtggcagatgagcgacaccgatcgctccacggtggcaaccaacacaactaccgctcttgcaaccgcggtgcgtgatttgggcatgtcgccggctgctgctctgactgatttgcgcgagctgtctgacgttaccggcatcggtgcttcaattagcgatgaggatatccagaatgcggcgaaacagtggcaggagactgaatctgaaaccagccctccgccgccgatcggaggtccagtatcagaaaagcctactggcgatagtcgaccagataaatcaaatcgtcacgggttcctacgatggttcacaggcaagcgctgagagcattgctaaatcgcttgttgactactccggggtgatcgacgactgggccgaaatggtcggtcgaaagatgtttgcccaggtggagcgtgaagagtggaatcagtggcgctctgtttcggaagaaatatccgctggtctgcgtgacgtgattggtaacactcctgtcggcatggtggcgcaagacatcgtttaccgacagattcgctacatgaagtctctgccattagaggcggccggacgtgtcagggaaattcaggagcgtgcgatacaggctgtcatccatggtgagcgccccgatcagctttacgagatgatcatgcaatccggtgacgtggcggccagcagggcgcggatgatagcccgcacagagatagggcgcgcaactggcgcactgacccaggcacgggctctggcagttggatcagagggatactggtggcgcattgaaggtgcaggcaccaggccctcacaccgaaaaatgaaagataagtttgtgcgctgggatagcccgccaacgctcgatggcatgactggacacgccgggtgcctgcctaactgcaagtgttggtcggaagtgcaaatacctgaccctgtaaaataacaggccgccaatgagcggccttttcaatgcccgcaattcagcaggtaacccatgaaatatttctttaaaacccgcctgggtaatacccgctttcaacttgctgatgggtctgtcctgtttaaggacgtcccgatcgcaaggactggtgagcaggagtacgacgccacagagcggcctgagcttgtcccaaacgacagagggaaggtcatcgtacgccggatgccagaagaggtgttcagcgagcgagccatggcgtcattcgaaggaatggcagtcactatcggccatccgcgagattttgacgggcagatcatctttgttacccctgataactggcgccagctggctcacgggcacatccagaacgtacgacgtggcacggacgataaaatcgatctgctgctggctgatgtcatcgtcaaaaccccggaagccctgcaggccattgatgatggtgatgacgaggtcagctgcgggtacgacgccgattacgaacagatttcacctggtctcgcaaagcaatctgcgattaccgctaaccatctggcccttgtccctaacgggcgggccggtttccgttgtgcaataggggattctatgccaagcactactaaaaactggtttacccggctcctgaaggcccgtaaaaccggggacgctgccgaaatggcaagtctcattgataacccgcctgatgatgtcacgggcgataacgatgtatcgacctctatgacacccggcggagtggtcatcaaccttgcaccgcaaaatccgcttcccggcccggcattgcctggtactggcgatggtgaggaagaaattcctgcatggggtaaggcgctgattgaggcggtggccaaactcacgcctgcggcagctgctcctggtaccggcgatgccgaggatgaagaggagaaaaaggaagaggagggtaaggttaccggcgatgccgcttatcgtgccgatctgattcagccaggcatccagttgccagaaaaggcgaagccgacagcattcaagcgccaggtgcttgcctctgccgatcaatctctggttcgctctattgtcggtgatgccgatatcagcaagctgaaaaaagccacggtagatatggctttcacggctgtttctgagctggcgaaaaaccgcaataccaaaaccgtcgacagcctgcaaacgcagactgccaccactgttaaaaccattgccggtatgaatcaggccgcgcaggaattctggtctaaacgaggctaactaatgggtaatacatttctttaccggatgccagcgggcatcgccggggcaatttctcgtccgcaggatctgacggttgaacctcaactgctggactcctccaaccttttccccgcttacggccttggcggcaagatttcctccgggaaatttgtgccaatcgctgcgagcgatacagcgtcggtgctggtgggcatttatgttcgtccgtatccgaccgccagccagccggataaagtccagcaggtaggcagcggtaaaaacttcaccggcgattgcctggtacgtggttacgtcacggtaaacatcggcgcggatgcatccagcgttgctctgcatggcccggtctacatgcgagtggccacaccatccgcctcaagccctctcggcgcgttccttgccgccgctgatggctcgaataccgtccagatcactaacgcttacttcaatggccctggcgacaccagcggcaacattgagctggccttcaatatttaaggaaatcgcaaatgccaatgacatttgaccaggcgacagtcgacggcactggtgcctttcttgtccatgagctggagcgtctcgatcagacactgaatctgccgctggtgaatttcacctggtcgcgcgatatccagttgcgtgaagacgtgtctattgctgatgagatcagctcgttcactaacaccacttttgctgctgccggtacgccgaatgctaacggtaaaaactggcttagcaaagccgcgaccgcgatggctggacttaacgtcgacatcgcaaaaactggcttcccgctcacactgtggggtatggagcttggctggaccgttcctgaattgcaggcagctgcgcaggttggtcgcccgatcgacacgcagaagtacgacggcatgcagctgaagtggaacatggacacggacgagcaggtttatatcggcgattccggtctgaacgttaaaggcctgctgaacctgacgcaggtaacgccgaccaacgccgcgaagacctgggcgacctccaccgctgacgaaatccgggcgagcattaatgccgggttgagtgctgcgtgggccaactcagcttactccatggtaccgacggacatgctgatcccgccggagcagttctctctgctggcaagcaccatcgtatccagcgctggtaaccagtccctgctgacctatctggaaaccaacaccatcgcataccaccagaacgggcgtcctctgaacatccgtccggtgaaatgggcgaaaggtcgtggcgtgtcgaactctgatcgcatgatgttctacaccaacgacaagaaatacgttcgcttcccgatggttccgctgatgagcgtgccgatccagtatcgcggcctgtatcagctcgtaacctattacggcaagctgggtgcagtagagccggtttatccggaaactctggcctacgtcgacggcatctaacctgcggcggcccgaaagggccgctcatgaggacttgcaatgaaaaagatttacgtactctccccgtttaacttcaacgacggcaaagagcaaaagcatttcccggttggcttccacgacgtcgatgacacggttgctgatcactggttcgtaaaagcgcactgttctccggatggcgaagcgccagcggtcgcagaagacccgcgcattgctgagctggaagcaaaaatcgccgagaaagacgcgcgtattgctgaactcgaagcgcaattgccggagactaccaataatggcaagaaatcaaagtctgccgacgcctgagcagttcagggcaacctttccgcagttcgctgacgatacaaagtaccccacgccaatgattcaggctcgactgaatcttgctgatgccatgctgagtgagtcgcgctttggcgtggatatctttccctacatcgtcgggctgtatgttgcgcactacatgtacctttacgccgccgatatgcgtggtgtagctgtgggtactgctggtggcataaatagcggcatacagaccgcgaaatcagtggataaggtttcagccagttatgacgcaagcgcaaccctggaccctaatgccggtttctggaacaactcccgttacggatcggagttctgggaatacctgatgatgtttggtgccggtgcggttcaactggggacgccggaatgaaaagcgggctcacaattcgggaagacaattacagcagcgttctggatgcgctgaagcagctgtcaggcactgatgtgctggttggtatcccggcaggtcctccgcgcgatgatgcgccgctgagcaacgctgagctggggtatctccagtccaccggggcaaccgtagagatagacggtgagaccgttactctgccgccaaggccatttctggacatgggtattgaggattcccgggataaaacgacagagcgtttaaagctggccgctcagtctgcgcttgaaggtaaggcagatgtggcgtcgatgcatcttgaagccgcaggccagattgcgcgtgatgcctcaaaggctgtcattgaggcaggcgatcgtctgaccccactatctgaaaaaaccatcaagaagcgcagagaaatgaagcctcccattccaggcgataagccgttgcgtgcccgcggattcctgttcagagcgattcagtatgtcgtgaggaaagaataatgccgtttctcgatgtgacggatgttctgcttgatccggactttgtcgacctgtctctggtgtgttatcgacaggtgcagacagtggacgaagataattttccaaccaataccgtgcaggctattccgttctctggtgtcgtaaccgtcgaccgttcactggaagcgaagcgtatggccgccggacagaacatcaacggggccattctcatcgtgacgcagttcaggctgactcaggggcaacccggattagatgccgatatcgtaacctaccgcgggcgagattatcgtgtgacgtttgtcgacccgtatacggcgtacggtgccgggttcgttcaggcgcattgcgagcttctggaattcgacgggggaacgccaattgagtaacgacagcacaacggcgggatatctgacccccgtcggtgattcaccgccctacgatgaggatctggaacggctaatcagccgctggatacggggtgtgacagggctggctgccacgctggtttacccacgctggactgacccgcaaaagcagatacccaaaaacggcaccacctggtgcgcgttcggtatcaccggcattcaggaggacttcaacccggcgtacgtgcagggcgaagagaacaccgaacagtggtcgcatgagaccgtgagcctgatcttgtgcttctatggcccgcaggggctggcaatggccacgcgctttcgtgacggtctgctggtctcgcagaacaatgacgagctcaaccgctctggcctgacatttctgcagcatgggcggatcctcaatctgcccgaactcatcaataaccagtgggtgcgccggtacgatatcagcgttgacctgcgccgcaaaatcatccgccagtacggcattcaatcgctggtcgacgcgccagtgcaattttttggagattaaaacatggcacagggcttacctgtttccaatgtcgttaacgttgacgtcatcatgtcaccggtagcggcaacggggcgaaacttcggtgcgctcctcattctgggaacctctaccgttattccggttaccgagcgcattcgccagtattcggccattgaagatatcggcgatgattttggcgctgactccccggaatacgaagcagcgaccatcttcttttcacaatcaccaaaacccacgctggtctatatcggccgttgggcgaagacgctggcggaaggagaggccggggcggtggaaaccttgctacaggccgttaatgcctgccttcagtataccaactggtacgggctggcaattgccgacagcgccgatctggttgaggctgacgtgatttccgttgctgctgctattgaggcatccagcttaagccgcattctggccgttaccactgctgatgtgaatgtgctggtctcggggaataccgacaacatcggctataagctgaaagccgccggctacagccgtacgttctggcagtacagctccagcagcaaatacgccgctatctcggcatttggccgtgcgtttacggtgaatttcaccggcaacaacaccacgatcaccctgaagttcaaaaccgagccgggcgtgacgcacgaaacgctgacgaccgcacaggcgtccgctattgatgctattaacggtaacgtctacgtctactacgccaacgatacagcgattatccagcagggtgtgatggcgaacggtgatttctttgatgagcggcatggcctggactggctgcagaactacgttcagaccaatctctataacctgctttacacctcggccaccaaaatcccgcagaccgacgcaggcgtaacccggttaatgaccaacgtcgaagcctcactggatcaggcggtaaataacggcctcattgctccgggtgtctggaacggtggcccgattggccagattgaatccggggataccctgaccaagggttactacgtctacgccgacgcggtagctaaccaggctcaatccgacagggaagcgcgtaagtcgccggtaattcaggcggcgatcaagctggctggcgctattcattatggcgacgtgcagatcaacgtggtccgttaaggggaactaaatgtctacttactcttttattgacgtctctgcatccctgacgggcccgaccggcagtatcgatctgggttacggctcggcgaactccgaagaggggatcaccgtagtcatggcagaggcaaaaaacaccatgaccgtaggcgccgacggggaagtgatgcacagccttcacgccggtaagagcggcaccatcacggtaacgctgcttaagacctccccggtcaacaaaaaactgtctctgatgtacaacgcacagagccagtcttcagccacctggggtaacaacgtcatcgtagtgcgaaacaaagtctctggcgacatctcgacagcgcgttcctgcgccttccagaaacagccggatcacgccaacgcaaaggttggtaacacagtgtcgtgggtttttgactgcggcaagattgaccaactgctgggggagttttaacagatggaatttgaaatcaaaggggttaattaccgaaccgccaaacttgacgtattccagcaactgaaggtcagccgtaagctgctgccggtgctggccgggctcgttagtgaattttccacgctgaaagcgcaggccgctgcgggtaactctggtgcagtgctggaaagcgtactgccgaaaattgccgatacgctggccgcgctgccggatgaggacgttaacgcggtgatttatccgtgcctgagcgtcgtttcccgccagcacgaaaagggctggacgaaggtgttcgatcagggcgtactgatgttcgacgatacggacctgtttaccatgctgcagctggtggcgcgggtggtcgccgatagtctgggaaattttttgaaagaactccccgccagcgagacgtccaccccgccagtggcctgacgctggaaactcttcctgaaggcgaaagcttcctgatgcgcccggttgatgccggatacatcacttacaccgcacttaaagacggctcggtcgacctggccgatgttgcccgcatgaatgactggctggacctaaaagccgataacgaataccgcatagcgaaatggagagaggacaatgaacgctgaaacgctcaaggactttctgatctcgcttgggtttaacgttgatgaggccggtgctaaaaagttcgatgctgtagtggcgggtacgacgctgaaagcgattgagctaggcgtcaaggtcgaagcggcagcgctttctgttgtcgcgttcaccgccaaaatagccagcagcctcgacaacctctattgggcctctcagcgcaccggagcgacggtagagggcatcaagcaaatcgggtatgcagttagccaggtaggcggcagcgccgactcagcgcgtggatcgcttgagaatctggcacggtttatccgcaataacccaggcgcggaaggtttcctgaaccggctgggggttcaaacgcgtgatgccagcggcaatatgcgggacatggcgacgatctttaccggcgtcggccagcgtcttagcagcatgccgtattaccgcgcgaaccagtacgctcaaatgctgggtctggatgaaaacaccctgatggcaatgcgtcgcggtatcggccagtttagtggcgaatacaccgcgatggcgaaggcgatcggctataacgccgatgtggccgccgtcagctctaataaattcatgacctcgctgcgctcctttgggctgatggcaggcatggcgcgggataaaataggctccagcctcgctgatggccttgctggctctctggacaggctgcgtcgacaaattctggaaaacttcccgaaaattgaaggcgcaataaccggtaccgtgaaaggaattctctgggctggtgagatggtaggcagggtaatttaccgccttattcaggccgccagtgatatccgggcctggtggatcgggctggatagcgacacacaaaagcttattcagacgcttggtggcttgcttgtagcctggcgattgctgaatgcggcaatgcttgcctctccgattacctgggtgctggcgctcgcaggcgccatcctggtgctgtacgacgattacaagacctggaaggaaggcggtaaaagcctcatcgactggaagtcgtgggaaccggcgataactctggcgcttaacgccattgaaaaactatggactggtgtgaagcgccttaaagatgagctgattaagcttttcggtatcgaccctaaaacatggtcgattaagttcgaattcgacagtctgaagaagcagttcaatgagctgaacaagatgctggataccataggcaagcttctcaatgcgattgatgaaggtcgctggtcagacgcggcagcttacgccagacagctgctgaatcagggcggcgagccgacaccatcaaacgcggtgacagacagcgccaatagagctgcggactggattcagaataaaaccgggtttgaccctcgcagtattggtcaagccgttactggctggtttggcgctgacgctactcaatacgggcagtctgttaaacgacctcaggccactaaagcaggcgctcagttgctgggctggatggctccgatgatgggtaagctggaagcgctgtacaacctccctgcgggcctgctgcgtagcgtagcccttacagagtctggcggtaaccagttcgctgtttctggtgctggcgcacagggattgttccagtttatgcctggaaccgctcgggatatggggctacgcgggaatgatgtcttcgacccgatcaagtcagcggaagcagcggcgcgatatctttcgatgctcctgcagaagaacggcggtgatctgaataaaactctggcctcctataactggggcatcggtaatgtgcagaagtacggcatggcgctgatgccgcaggaaaccaggcaatatatcccgaaagtgttgagcaatatgccgggggctggggcgacattgaaccagaataccgttatcaacatttctggtgtcagcgatccgagagaggcggggaaaatcgtctctgaaagccagggcaacgttaatgcacgcgctacccagcaactaacccgggggccgagctgatggatattctttcaaccattttccagcagcggagccgccgtattggtctgatgatacccgatgtggtggtttcagagcgtcatagcgatgctctggaggtgacagagcatccagttgaaaggcctacaagcgcaggcacagggttcattgcagaccatgcgtatcggcgcccgtcagaagtcgttatggagataggctttgctggtggtggttccttgctggatttttatgatacagcaggcatcgggctgtctacgccccttaacaacatggggcctaaggaagtctatgctgagctgctcaaaatgcagcaggaaaggcaattgcttgatgtgaccaccgggaaacgtctttataccaatatggtgatccgctctctggatgtgacgaccgaacgtaccagcgaaaacgtactgatggcgacagttacactgagggaaataatcaccagccaaacgcagacagtcagcgtggcagcgaaggaaaatatgaaagagggggtaaacacgtcagcggtgcaaaattcaggagtaaagacgccgactccgaaagatgagtcgctactaagccggtttgtcggcttcatctcgggaggttaaatggctgtttcagaaatccctctgtcaccagaaaaccagcgattctccatatctgtggcaggtcaaagtctgcaaatggctgtcacctggcgtgctgctttctggtgtctggatatcatggacagtaccggggccgacctgataaaggggatcccgcttatcaccggcgccaacctgttggcgcagtatcgctatctcgggcttggcttttcgctctatgtcaattgcgacgacccggcaaatgataatccaacccaaacagacctcggcattaaaagccatctctacgcagtaacggagtgattatgtctcagaactggatgcggcactttgagctgcagcttattgatgataagggtgatgggatttcgctgtcggattttaaggtgacgtttaatatccagaagatgcccgcgactatctttaacggattcgtcggtaacttcaaaatctacaatctgtcgccggagactcaaaaccggatcatgggtaaagagtttactcgtgtaagggctattgccgggtataacggcacagcagatagcagcggcaactatcctgataaaaatgtggggatcatctttaacggtgatattcgctttaccgtcaccggcaaagataacgtcaccgatagttgggtgcttatccagtgtattgatggctgggaggggcatctcaacgccagcgtgaaaacgacagtgtcggcaggctggaagcatgctgacctgtttgatttgggtatgcagtcccttagcccttatggcattacagagggaagcaggccggattttggtccaactgtattcccccgcggccgcactatttatcagaacactggacgccttatgtacagccttgcagggcagtgcaaggctaactggtggtacgaaaacaaccaggtgcatatcgttcctgatgataagtacatacaggaagcgattgtgctgaacgccaatacgggcctgatcggtatgcctcagcagacgatgggcgccggggtaaatgtgcgctgtctgataaacccgaatattaagcttggggggcttatcaggctggatcaggcttctgtatatcgtcaggctctcggtaatgatcaggttggtcagtcaccaggtctattaggcgaaagtaccacagacggtaacatctatgtcgatgggcttcccgggtcgcagctggcggcaatcaataccgacggtgattacattgtcggcagcattgactatactggcgatactcgcgggcaggcgtggtatatggacctgctgtgtctggcgaaaggggctagagaactgcaaagcctgagcactttaaacaaggttggctgatgaaaaaattaggaatatttttggtctttggggtgttttattcctgcggagctttttctgccactcaatgcggaccttttttcttaaagggcgaaagcgatgggttgatgcatatcaacggacaagcccctgaaacgcagaaaatgaccttcctcaagcaaaaagacgacttcgataacgtcatgatgcaatggatgctcccagacgccaaaacagggcgttggctaggtctcgactacgttaagcgcaacaataaggccatcctcaacgtcgaagtgatccgcaagaacatggacgagcccagagagttctggacgtacgactgtcggaaggtgaagtaatctggttgctcgctattttatgtgcttaaaggcagggtaggtaagcgttatgtcaaattttctcaccggtgtaaaaattgatcatccgcctatcccttgcgaagacctgaaatgtgaacaggagagaacgggggatatttttattaattaccccgttaatggagaaagattttccccagaaaatcccgccgacaatgcatttaacgttaaaacaccaagcggtagtgattaagctcatttaatcccctaatctgtttcaaaaacaggaggggaaatgaacgcttacgactacaagaaagcagtttaccggatagcaaggcatgaggctggtcattggcttgcagcctacatcttgggatgggatccaaaaaaaattgaactaaaagttcccagctcggaaaatagtcattatggctatgcgttatgcgcctataaagtaaatttagagactatatgtgatgtcagagattacgctcgtggcagagttaaggtgctctattgtggtgcatatgctgatggttatgatggatataattttgactatgaaagaatagggcgtgagatggggcgcacaggtggtgcgtattctgatttttggaaagccgaagagatatatttcttttattataattgccttgagagtaaaggtgattgggagtacgaatttaatcctattgtgaacgacgttaaattgttagtcagaatgcatcatgacttccttgattctgttggaaattatgcaaaagataaagctttgaacatcggtgatgttatagagataactcctgatactctcaaaaccttgttcatagaaagtaagataagactcccttcttattagcttatagttaagaagcccgctccggcgggttttttaatgccggagtaaaccaaatgcccgtagcactaaactcccagctcggcagtaaagagcaggcagacgcacaactggcgcaggcgatcatgtctgcaatgcgcgtctccatgcctggcatcattcagtcgtttgatccggatgctgtcaccgctgttgttcagccagccattaaaggcgcagagaaggacgaatccggcgcccaggtatcggtaaacctcccactgctggtggacgttcctgtcgttttccctcgtggcggaggctgtacgctgacttttcctgttaagcctggtgatgaatgccttgttatctttgcagaccgctgtatcgatttctggtggcaaagtggaggtattcaggagccagtagacgagcgcatgcatgatttgtcggatgccttctgcattgtcggccctcagtctcaggcgaaaaaaatcggcggtatcagcaccagtgcggtagagctgcgcagcgatgacggggaaacaaagttgagccttaatcctgccagcggagctatcaacggcacggcgccgggaggttttaacctgaacgggcttaaaattctttcggacggccgcctgcagctggtggatggctcaatcgttgataagcatacgcatggtggcgttgaacctggtggcagcagtacagcaccactcggaggatgatatgcgataccgtcgagaagatgacgatggggattacaccttcggtcagggcgatgatacctggctggttaactcccccgaggctgtcgcgcaggccataaaaactcgctttctgctttggtacggacagtggtttctggacaccacagaaggtacgccatggattcagtccgttctgggtaagcaaaagccggatacctacaacctcgctatccgtaagcggatcctcgaaacgcagggggttagctcaatcactgcatttaataccactgttgacggtaccacgcgccgtgtaacgttcactgcgacggtggaaaccatctacgggacaaccacagtaacttcggaggcgtaatgtctttggacctcgacacgctcggcttatcggcaacggtaaccgctgaggggataagtgcgcccgactaccagaccgttctggacaccatcactggttattttcagcagatttatggcagtgatgcctatcttgacccggacagcaaagacggccagatggtcgctctggtggctctggccattcacgatgccaacaacacggccatttccgtttaccggtcattttctccgtcgacggcgctggacgatgcattaaccagtaacgtcaaaattaacggcatcactcgccgtgctgcgacaaactctacggtagatgagctgatcgaaggtgaggccggaacgttgatcacaaacgggtctgtgaaagatgccaacggtatcatctggaatcttcctgctcaggtgacaattggtattgatgggacggttattgctacagcgacgtgttctgttgctggtgctgtggccgcccctgccgggtcagtcaataagataaacaccccgacacgtggttgggtatcagtaactaacccgcaagcggctacggtaggcgttgctgccgaaacaaatgctgaattgcgtgtccggcaatcacagagcgttgctttaccgtctctgacgccgtttgaggcggtagatggcgcgatagcaaatatcagcggcgtaacgcgacacaagctgtatgagaacgatacagataccactgatgcaaatggcctgcctccgcactcaatcgccgccattgtagaaggtggtgatgcgacggtcattgcaaacagcattcgtggtgtgaaagggcagggcgtaacaccctacggtagtacggtgattgttgtgcctgataagtacggaaaccctcactcggtaggtttttcaaggccggtcgatgtacccatttacgtcaaaatcactatcgaacctcttacgggctacacatcccaggttggcgaagagataaaggcggctgtatctgcctacattaactcactggcaatcggcgccagcgttcttctcagtcgcgtttactcaccggctaaccttggtgttgtcagtggtggtaatgccaggtattacgacattaccgagttgctgatcgggacgtctgccggtggcgtagccgcggcaaacgtggatattgcctttgaccagtcagcatcctgcgccgtcagcaatattaatctggtggtctcatgagcagatacactgaccgcataacaaactaccacgccggtaaaccaaagttctttgcccacgtcgacctatccaccaggccactgagtgatgtttccgatgccatgtcacggctaatacccgattttgatattgataccgccgtaggcgtgcaactcgacgttgtgggtgaatgggttgggcgctcccggcgcgtagccacaccggtaaccgggatttatttttcgtgggacaccgagcgggttggctgggaccagggggtctggcagggcccatatgacccaaacgacggttttatcgatctaagcgatgaaatatatcggctaatgctgaaggtgaaagtggcgataaacaactgggatggacagaacgactcgcttcctccaattcttgataccgcccttgccgggtccgggatccgaatggctattgtcgacaaccaggatatgtcgatttctatctggatactcggtgacccatcggtagccctaagtgaaatagaccggttaattctggatagcgccgtcaataaaggcccctttatcgcattaccggcaggttacgtaccatcgcgctatgacattaacccaattgaccaggttaacagcgaactatggtgggctattcaaaacggttatatgacggttaaggccgccggagttcgtgtccgtgaaatagagaccgtcagtgatggttatcagttttttggcttcgatatcgaaaatgactatatcgctggtttcgaccgcgggtcatggggagagagattttaatggcgactaacgattttaaacccttcgctactggtagcggggcaaacgtattatcacaggctgattatgaagcgctatctgcactggcatcaggatttctttccggcaaagcctcgtcagcacaagtaaataaagcactacggcaatcctctacaattgctgccgtccttgcgcaattcatggcggatagcacaggaagcgatgtcctggataatggaaacattgccacgttactaaatattctcaagtccgcacttaataatcaggcagaaggacgcctgctccgcattcaggtttttaccgctagcggagcatgggtaaaaactgctggcactaaaaaagtcagaatcaaggcatggggtgcaggcgggggtgggaagggaacggacacagcagggacgggggcatcaagtggcgcaggtggggcttatgtagagggcttgtatgatgtaagtagcatcactggagcaaatattgttatcggtgctggtggcgctgctgttgtggcaggaaattccggaaacggtggcgatggtggtgatactaccattgttgatcttggcatttctgcaggcggtgggaagggcggcaattcaacgggtaattctgctggaggtactcccggcgcgccctctgtagggactattttttcagtggtcgggcaaggtggccagggggcggtcggcgccttgggcggtgtgggtggagcgtctcacagcagttatggtggtcttcctcacgtcagtacatctggagatgatggtttctttcccggtggcggcggtgctggtgcatcgtatgattcagtggccagggcgtcagggaaaggggctaatggctacgttatcattgaggagctggcataatggcaggaaattatgcggtcattgaaaacgggatagtcatcaatataattattgcagaaaatggttatgagtacgctggtgcagaccttgtggaatatcaagaaaacatattttgccagccaggaatgttttataacaaagatgatggtttattctatgacgacaaagagttctcaaaaataaataacatcatctaagtgcatgtaaattaccaatcaaccggcatatgccggtttttttattggggcgaccatgagtgaatacgataccggcaatcctgtgccgtctgcatccatgcctgatgcatgggataatatgcagtctattgacaagttcgttaatagcagcgaagagaccattaccacacgcacaggcgaacagttagatactttgcgtggcgttaatgttaaggcggacaaccagctaacgcagcagcaagaagactttgaaacctcacaaaaagaaagggatgctgtagttgaggaagcccgccagaacctgatccctctcagccggcagtacatgacgctggcggcggcacaagcggatattgcgaataaccccgagggtagcaccacgtattaccgcagcccggacgacagcgcgctcgcgatcgaagtcatgaatgttggcgggacgctgcagcctaccgggcgaaaaatgccgtccagtcaggctgtagattcagtgaggggattaatagacagccagggcgaaaacccattttcagtggtgtttaaaaatggtctttcaccgttcggctacaaagacgggcgactgtatgctgatgaatttcagaagctctattcttcagatgccgggttagagtttggcggcagcatcattgataacaatccgccggatggatggcgttttgtcatctactatcgaaatggtctggtgatgtgtggtcaacggaatgacggcacgatgatcggtttcggtgagggcggcagcggtggcggctcgattgagccgggcgatacggcagcggactatgactcaatccgcaactacacgggcacagcaactgtgcgcgacgtcgtcggccagcgtatcgccggcaggttcgtggtcaatccggatgatacgacctccggggaaataccgggcgggatactggtcgatgtgctgggacgccgctggtatcgccaggcggaatttgtcagctatgacatgtttatggccccccgtgttccaggtgctacgctccttgctgtgcaggtcgccctggcgatgggcaactgttcatccgcgatagcatacctgtctggtgttgaagctgccgatgccgctatccagaatgctcatcgttatgcgaacctgctcaatatcccggttcgtcagaatgatggtgccttcctggtattagttgaccatgaagcagaggttcggacaaaaacgtcactcggagggtcgataatttttacctccgctgactcaggtgttaacgaaatccgctgggggccactgcgactgcttgatcctacagcgcctgagccaaaacgtatgttcaatatcaaggggaaagaacgtattgaactcactcctgctgagctggctacgttcaacaccagttactctcagtacctgaaaaaaggctctaactatctgccgtatccgaaactgtatccttattacggcgggatgttctatgcgctttctaatgaagtggagatttaccgaaacggaaacagggataaccctcgtgaccgggttttataccgcgaattctcccgtattggtagaaatggcgcgctgacggaacggattgtgaaagatattccgaccggctcaattggttacgctgcgattatcccgaaagaagatgattttctggaatttgaatgcccgcattttattgagctgggcgacagtcgtcgattcctgaatatcgaagtttccaggccgatggtgcgcattaaaaatctggtgcatacgtcgtggcaaacagcttcaacaagtctcgaaagccgcgtggttatttctgctcgcgaagtctttgacgtcttttgcgaatacggagaaaccacctgtcacccggcggagaacggctcatatgtcatctgcattcgagatacctgcaacgtgcatatcgataactattacggactgcatggctggggatttcaggggcatcacggaataaagggtttatacggcaacagaaatacgtttaaccgcgttgatttccacagcttcgggtacgatgttttcttcaaagatctgactgtgaaaggcaggcaaattaacctgcagggaggtaatgagtggtcgatagagaaacttcgtctgtatatcacccgcaccagtggcgatgcagtggagtatttccttaactacgccatcggcatgaggcaggactatgccagtgactgcgatggcattctcaatattgatggtgtcacggtgatgtgggacagagggctacccgcatggtacaacacgacccggtcatttgaccttgtcagaattatcgatacggccaactctcttgatcagggcatcgacagcaaactaccgcctaccatcaccatccgcaatatagtgtttgatctcgccggcatccagaccggaagaccgaatgacaattttgagttctgcgctgttacggccttacgttctcagtttaccgactacgcggtaaccggacgtaaaacgctgctacccgacaatatcaccgttgatggaatgacggctattaacgtccagccaacacagaacgctgtcatgtgcggcatcaaattgcctgccgacctgtatcagaacactgtgggctcacgtaacaaaaagggcagcgacgggacgaacgcccggatcacactgcgcaacctgcacagcgttatcaacaatccgtccatcgagctggccgcagcccagaccgtcgatattccgggagacgcggcaaactggaccgctgattacctgaacagtgattacagctggataccgcggattaccctggataattgcatcccggcaattatccatactcctggcgcaaaagctgttgtcgatattcatggcggcaagctggcgcgggtctacaccaacggcaatggcaaccgctgccgggtcaccggtgctgatattgagctgatacctgatgcgtcaggcgtggtctattttgcagcagataaaacactggttactggctgttcgtggctgaatccgacgaacggcgcaacctatactggaaccttacgcggttctggaaatgagatgatcggtgatagcgccaaagcgcctaacctccctgcaaatgcgtttatttgaggagtaacaaatgtctaatggaacacgtattctgctcaactcggacggtatcatcaccgactggagcaagcagcactttgagcctgtagcttctccgctatcggcaatcagtaatccgaaggtcgcttacgacctgttgacgcctctcgataactcgcggcacggatttagcgtgcagcagggcgttcagaagctgaaaccatatggactgcagtttcaaggtactgcaggtagtcaaacagactttacggaggctggacttgcgggactatctttcctgacggctttccgtttcagtgccatcgacacattccagtacgttctggactgtcgagatcttaccgtcggctccggtcacggctttgccatcacatacaaccccaccgggcagcgcctggagctgcgtgttgcgtggcctgatggctcaatgggtatttactacgcaaccggacaaaccatcgttgctgacaaatggtatgtggcctgtggtgtcatttcccctaaccgcaatcacaaattaactttgtctgatggaaccgcaattgctgctagcccaacgggctatctggctaacgttgctggcagtcctctcatgctcggtgcaagtgccgcaggatcctcgatgctcaaaggcgacattgggttctttggtgcatggggtaatgagttctccgcaggagatatcacaaatgccatagccctgggaactagtatcatgaccggaagaggggagacggtatgacaacaatcgcagttaagattgagactgtttcaggggcaaaagtagaattctcacatgaagtatttatctgggatgaactgaaccagtttgagcgtgatgacatcatcagtttactggtaaacggtaatgatgatgcgcaagccgttatatcagtaagcactggctatacgctgagttggtcccaaagcgaaaacgaggccccttaaagacttatgtcgctgtcacagtaaccaatagccacatcttgtattgaccttgcccaccaacaaaactactgtatataaatacagcattaattggagggcagatcatgcttcgacagacagacatcgccgcggctttccgcgagtccattttgcgcagttccaaggggttccagtacattcacacccgagacttcgttaccgcactgcgcctgcgcggcatccacttctccgaggtggaggcgaactcctggatcgcgcgggaacaaacgtatttcgtcgataagacgcctgaccatagcgaaaacaggctgtggatgatggcagggatggggaggggctctgatggtgctagtcagggttgttggagactccaatccatagttttatgacgcttatggtaaatagtgcgaggatgacaaatacaacgcttgaggtgatcagaagagtagtcatagtgagccttattaatagtggttattattcaggcagctcatttagtgaatagttcaaagtgtgttgcacataggcccacccggcagctaatgtatgctgctgcctggtgggggtagtgactcaggcaggagatcaccgcgaatgattatatagaccgatcaacgcacaaaccagtcgtcagccgtctcccaagcgtcttttagagtggtctctacaaattctttggcgatttctttatcagtcgcccacaaaacgctcagtccatcattactggccgttttcacgatcacttcaacgtcgtcatattgcttgctgattcgacgggtcatttcgtctttcaaggcctccattgacccctttggcattttcgcggctttctctttggcaatgctgatttctacacgcatgataatcacctttgtgctggttgaatatacagtattcagcgagagatgattactagtcaaatggattgtttaggtttgtgagtacataattaagtacatattttaggtaattattaattaattttattttaaatcagttagttataattttgttcaagtaatcttcggcataatcgccgaccagcattaggattttcttgctcatctttgtgtctcgttgtgggcgaaaggtgtcttagatatagcctggcgacttgcagaatgcgaaccgttcaggatgccgacgacggtgtcgtgtgcgtcttgtaaccgggctcatgtttttttgctaacgacaactttgttcgacatcgcgctgtggctcgttatccgcaaaaaatcggtttgtggggagtaaggggagcagaagaatattgttaccgtttagatttcgcgccagcactattaaggaaggtgcgaataagcaggtcatttcttcccaagctgactcgctgattaaaatttcgcggatctgggccgatttttttcccgcaaacacatcgaatcagcctatttaggctattttttccaccatttctggcgttatttccggtttttactgagatctctcccactgacgtatcatttggtccacccgaaacaggttggccagggtgaataacatcgccagttggttatcgtttttcagcagccctttgtatctggctttcacgaagccgaactgccgcttgatgatgcgaaacgggtgctccaccctggcacggatgctggctttcatgtattcgatgttgatggccgttttgttcttgcgcggatgctgcttcaaggtttttaccttgccgggacgctcggcgatcagccagtccacatccacctcggccagctcctcgcgctgtggcgctccttggtagccggcatcggctgagacaaattgctcctctccatgaagcagattacccagctgattgaggtcatgctcgttggccgcggtggtgaccaggctgtgggtcaggccactcttggcatcgacaccaatgtgggccttcatgccaaagtgccactgattgcctttcttggtctgatgcatctccggatcgcgttgctgctctttgttcttggtagagctgggtgcctcaatgatggtggcatccaccaaagtgccttgggtcatcatgacgcctgcttcggccagccagcgattgatggtcttgaacaattgacgggccagttgatgctgctcgagcaggtggcggaaattcatgatggtggtgcgatccggcagggcgctatccagggataatcgggcaaacaggcgcatggaggcgatttcgtacagggcatcttccatggcaccgtcgctcaggttgtaccaatgctgcatgcagtgaatacgcagcatggtctccagcggatagggccgtcggccattgcccgccttgggataaaacggctcgatgacttccaccatgttttgccatggcagaatctgctccatgcgggagaggaaaatctcttttcgggtctgacggcgcttagtgctgaattcactatcggcgaaggtgagttgatggctcatgatgtccctctgggatgcgctccggatgaatatgatgatctcatatcaggaacttgttcgcaccttccttaagcgtccgccgcgaaggggcaatcggatggaagccagatattttccctctgagtaattgattgcgttgttacgctaaatttgcataatgagcgaattatattgccccggtcgtctctatggtttcctttattcatccgcttaatgttttagcccgccttatggtatccattgcaaacattcctttggtgcattatttattgaatttatcattgactgttgtttcatattttaaatattgatattcatggtgcttttattttcgtggtgaaagtgggtgtttatgaataaatataattattaggtggttaagttgatcggtaatccatttttgctttatcatcgtcacgtttcacatcaatatatcttcaataattattccttaaggaaaggaactgctatggctgatacgttccagaatgaagtccccagggcgcgcattaatctcaaattatctcttcataccggcggcgcgcaaaagaaggtcgaactgccgctcaaactgcttaccattggcgattttagtcatgttaaggaaaaccggcctttatcggaaagagaaaaaatcaacgtcaataaaaataattttaacagcgtactttcggaatttagcccggaagttaacctctcggtgccgaatacgctggccggcaatggcgaagaggagaacgtcagactgcgttttaccgacatcaaagattttgaaccggagcaggttgcccggcaaattccgcaactccgcgccatgctggcgatgcgtaatttattacgcgatctcaaatccaatctgctcgataacgccactttcagaaaagagcttgaggcaatcctgaaagatccggcgctgtcccaggaattacgcgacgaaatgagtgcgcttgccccgaaataagtgcggggcaagtctgttaatggattaaccgggaaaatgctaatgtctgttaccacagaaaacgcccctgttcaggggcaaaccacgctgcaggaaaacagggcgggcgagggcgtttacgcctcgctgtttgaaaaaattaatctcaccccggcgtctcgcctcggggatatcaacgactttctggacgatgccgcgctctccgaggcgccggcggcggaacgtctcaccgcggcgatgcaggtgtttatggaacgcatccgccagtccggccagcgggtggaaaagctcgacaaaacgctgatcgatcaccatatcgccgagctggatttccagataagccgtcagctggacgcggtgatgcaccatcaggagtttcagcaggtcgaatccctgtggcgcggcctcaaacagctggtggacaacaccgactatcggcagaacgtcaaaacggagatcctcgacgtcgccaaagacgatctgcgccaggactttgaggacgcgccggagcttatccagagcggcatgtactggcacacctataccgcggagtatgacactcccggcggcgagccgatcggctcggtgatctcggcctatgagttcgacgccagcccgcaggatgtggcgctgctgcgcaatatctcccgcgtctctgcggccgcccatatgccgtttatcggcgccgtcggcccggccttcttcctgaaagagaccatggaagaggtggctgccattaaggatatcggcaactacttcgatcgtgcggaatatatccgctggaaggcgtttcgcgaaactgacgatgcccgctacatcggcctggtgatgccgcgcgtgctgggtcgtctgccgtacggtccggacaccgtgccggtgcgcagcttcaactatgtcgagcaggtgaagggcccggatcacgaaaaatatctctggaccagcgcggcgttctccttcgcatctaatatggtgaagagctttgttaacaacggctggtgcgtgcaaattcgcggtccgcaggcgggcggcgcggtgaaagatttgcctatccatctgtacgatctgggcaccggcaaccaggtgaagatcccttccgaggtgatgatcccggaaacgcgggagtttgagttcgccagcctgggctttatcccgctgtcgtactacaaaaatcgcgattacgcctgcttcttctcggccaactccgcgcagaaaccggcgctgtacgataccgccgacgccaccgccaacagccgtatcaacgcgcgtctgccttacatcttcctgctgtcgcgcatcgcgcactacctgaagatgatccagcgcgaaaatatcggcaccaccaaggaccggcgtctgctggagctggagctgaacacctgggtgcggagcctggtgaccgaaatgaccgaccccggcgacgagctgcaggcctcccatccgctgcgcgatgccagcgtggtggtggaagatatcgaggataacccgggcttcttccgcgtgaagctgtacgcggtgccgcacttccaggtcgaggggatggacgtcaatctgtcgctggttagccagatgccaaaggcgaaggcgtaggttcggacgatgatgaaaacggaacgtccgttgtggggccggggcattatggtgtcgcctcagcattttcaacagcaggctgcgtatgcagcctggactgcggaagtgattgcccggatgggtcttaaccacccctggggagtggttgaggcgaccttcgaaccagagatgctcaaactgggccgcctgcaggctcacaggctgcaggtccggttccaggatggcacgatgattgatacggacaatgccgatgcgctgccgtccgcgctgtcgctggacggcgcgcccggcgaggcggtgatcgtgctggcgctgcccctgatgcaggcgaatggcggcaactgtctgaagccggaggaggttgccgaaaggccggtgcgcttccggcagcgctggcgcgatgtccgtaaccagtttggggatgatacccggcagattgccgtcatacagccggagctgaccctccgcttcgcccaccaggacaacagcgattacctgacctgtccgcttgttcgcctgcagcgggactcgcagggggcctggcttatcgacgagacgtttctctcgccgctgctgcagatccagggcagccgctggctggcgacgcagcttgaacagctgctcgtccagctccgggctcgtctgacgcgcctgatggccatgcgtcgcgaaagcaatgaacggatggctgattttgccgtagccgatgtctctctgttctggttgctgaatgcgctgaacagcgccgaaccggtgctggggtactttctgcgttaccggcaaagcccgccggaacgcctctacccggagctggcgcgcctggctggtagcctgctgaccttttcgctcacccatcaggcgaatgccgtcccgatctatcagcatgaccagctgaacgcggtttttccgccgctgtttgatttactgagcgacctgctggaggcgagcctgccatcgcgggtggtggcgattgccctggagcatgatgtccggctgcacttctggcaggcgcgtctgcacgatgcccggctgcgggaaggggctgattactacctgtcggttcgttcgtcggtaccggtcgcccaactgcaggagcagtttccgcgccagtgcaaagtgggcagtccggatcatgtcaaagccatcgtcaactcctcgcggacaggggtgcccctcacgccattgcgtcatgtgccggcggcgatcccgctgcgtctggaaaatcagtatttcagcctcgatgtgtcccaccctctggcaacggaaatgctgcagagcggcacctgtatgttttacgtcccggggatgctcggtgagcctgaacttgaactttttgcggtactacgaacgtgaatgagcctaaacgcggcaacgccgcgtccattgatattgatgcgctgctgcagaacacctggctgcaggttatcagcctgcgccacggcccgcagttccgcgatgaggaagggtacacgctatggcagcgctgtattgctgatgtcgagcgcgtgcaacatgagctgaaggcgagcgggcttgatgacgtcagctgtcagcatattctcaccgcccagtgcgcgctgctcgatgaagcagtgaaaggtcgcggcgtggaggatgaggcctgcctgcagtggtatgacattccgctgcaggggcacttcctcggcaccatggacgccggcgacaccctgtgcgagcggatgcgtgatgtgttgcgtgaaccggcgcccaacctggccgtggtcacctgttttcagcgggtgatgctgctgggttttattggcagctttcgctccctccacgaccccgagcgcctgaagctggtcaacgcgctcggtgagcgtgttcctccttttcagtgcccggctaccgctcccgtactggtagagagtcgcgccggtctggggataagcggctggctggccccatggccggtacgtattggcctgagcgtggtggtggtactcgccctgtggtggggactcaaccactggctcgatcacctgctgctgaccttgttaccgggggaggtgaaatgagccccccgcagcagcgtgggctggcgctgtgggccagtctgctgagtgcgctggtgtgcctgctatttttgccggttccccgctggggggcgtggctcattctgctggtcacgctggccctgatcatcgggatctggcgcatcgccagtcgtcgtaccggacgtaacgtcgcatcaaccctggcccctctcccggagggcgcttatcgccaaccggtggtcctcgtttgcggcgacctgccgtgtgtctggccgcaagcgtcaccggtgcgagtggtcaaacagggctgctggatccgcgtggaaaagacggaggagctgcagcaggtcgcgcgccaggtattgagccagcggccggaatgggggcctcagctgtcggtgctgctctgcgtctgcccgcagcggcatgcgcaaagcgatgcgctgaccagcgctctgctggccctgcgctggcaactcagccagctgcgccagcagacggggtatgccgtaccgctggtgctgcaggggcaggtgggcagcgcgatgagtcgcgacctgttgtggcaggcggcgataccgggtgaagcggtgaaagtctggcagccctcctgcgccccctgttccgtaccggcctgggtaagcgccggtggggcggccgcgctggagcagcaggtgctgatgaacagcctgatgggctggtttgaacagcacgtccatgccgtgttgacggaagagaataccgacctgccacctctgacccctgcggccgtgctgtggggcctcgggccctcgctgcctggaaggctggcatcgtcggcctggacgacgtggttatcccgacatagcggcctgtcgcgggtagctggctggcagccagatgagagcgacaccggggacgcttcagctttgccggaattaatcctgccgcagttaccggtgggacggggactcacgccacgaggcagggcctggcgagcggcgctcgcgattttcaccctcgcggctgtcgccgcgctgctcagcagtggctggaacaatcgacaactgctgcagcgcgtgagcgtcgatattgcccgttatgagcggattgcgatggatgattatcgaccaaaagccagcgctgtcagggtgctgcgtgaagatgccgcgctgcttgatagctgggcgcgtaacggcgtcccgctgcgcctgagtctgggcttgtatcacggggagcagattcgcctgccgttgctggaggcgattcgcggttacgtgccgcctccgcctccgcccaggccggtgcagcgcgtcgcgccggatgtcatccgccttgacagcatgtcgctattcgataccgggaaatgggtactgaagcctggttcgacaaagcggctggtcagctcgctgatggacattaaggccaggcccgggtggctgatcgtggtggcgggtcacaccgacagcgtgggtgaggaaaaagccaaccagctattgtcgctgaaacgtgcggaatcggtccgcgactggatgcgcgataccggcgacgtgccggacagctgctttgccgttcagggctatggcgaaagccgaccaattgcaacaaacgatacgccggaaggccgtgcgctgaaccgtcgtgtcgaaatcagtctggtgccgcaggtagacgcctgccggttaccggaccaaccctctgcgtcatcccaggatgatggcgcttcactacacaatggagagtaattccatggcaattcctgtttatctttggctgaaagacgacggcggcgcggacattaaagggtctgtcgacgttcaggatcgtgaaggcagtatcgaagtggtggctcaggagcataacctgtacatcccgaccgataacaacaccggcaaactgaccggcacgcgtattcatacgccgttcctgttcaccaaggagatcgactcctccagcccctacctgtacaaggcagtgaccaccggccagaccctgaaatccgctgagttcaagtggtaccgaatcaacgatgccggccaggaagtggagtatttcaataccaaacttgagaacgtcaaggtggtgaaagtgaatcccctgatgcacgacatcaaaaaccccgcctacgagaagcacaaccatctggaacagattgagctgcgctacgagaagatcacctggacctataaagacggcaacatcattcactccgatagctggaacgaacgcgccaccgcgtaattgcccgtcatatttcgcgccgctggcgcgcaggcgacgttcgctcatcccggccgcatcgttatctctgcggccggggattattgcgggcgatcgcctgatgcgggcagcgtttctctgcccgccgttttttgctgagcgcctgagatacgggttctcagcaaagaaaaacacaatctgtctgcctgaccttgtgcgctaggggttcctgttcaggaacagcgacgggcggtagcgtgtccggaaacaataagagaggatctcatggaaaatccagccagcctgttacgccgtcttaatccctgctgtgcccgcgcaatggagggggcggcctccctgtgccagacccgggcgcatgccgagatcctgcccgagcactggctgctcaagctgctggaacagggggaaggcgatctgacggtgctggcgcggcgctatgaatgggatatggatgcgctgtggcaggatctgctgagctggctggataaacagccgcgctcggtacgtcatcgtccccagctctctgaccataccctgaggctgatgcaggaggcctggctgattgcctctctcagcggcgaagcgcagatccgcagtgttcacctgctgatggcgctggttgaaaaacagaatctgatccagtgcgatggcctgtggccgctgttaacgctgggccagcgtcagctggaacgcctgcgctccttgctggatgcccagtccgacgaacgtccgccagcgcagcaggaagcggcgctggcgcagccccatggcggggacgtggaatttgtggggcgtcctgcgggcagcgaactgaatgcggatgggctcaacccggcgctgcagaacgcgctggacaaattcactctcgacgtcaccgccaaagccagagacggccagattgacccggtgttcggacgcgacatggaaatccgccagatggtggatattctctcccgtcggcgaaaaaacaacccgatcctcgtcggtgagccgggcgtgggcaagaccgctctggtggaaggcctggcgctgcgcattgccgaaggcaacgtccccgacgcgctgaagccagtgtcggtgcgcacccttgacctcggtctgctgcaggccggcgccggggtcaaaggcgagttcgagcagcggctgaaaaatatcattgaggcggtacagcagtcgccttcgccggtgctgctgtttatcgacgaggcgcacacgatcatcggcgcgggtaatcaggcgggcggcgcggatgccgccaacctgctgaagccggcgctggcccggggcgaactgcggaccatcgccgccaccacctggagtgaatacaagcagtacttcgagcgcgacgccgcgctggagcgccgctttcagatggtcaaggtggatgagccggacgacgacaccgcctgcctgatgctgcgcggcctgaagtcccgctatgccgaccaccacggcgtgcatatcaccgatgatgcggtgcgcgccgccgtgacgctgtcacgacgctatctcaccggtcgccagctgccggacaaggcagtggatttactcgacaccgcttccgcccgcctgcgtatgagtttggataccgtgcctcagccgctgacccgcatgaaggcgcagctcaccgcgctggcgatggagaagcaggcgctgctggaagatattgcgctgggcaacagcgcccgcggcgatcggctggcggccattgagcaggaggagatccgccttattctggcgctggatacccttgaaactcagtatggtcaggagctgcagctgacggaagcgctgctcgcctgccgccgcgatatctcccgccaggcggaaattagcgatctacaaaccgcgcttatcgccgtccagcagggcaatccgctgctcgggctggacgtcgacgtccgcaccgtggcgacggtgattgccgactggaccggcgtgccgctctcctcgctaatgaaagatgagcagacggagcttctgagtctggaagagagtctcggcaaacgggtggttggccaggaggcggccctgagcgctattgcccggcgcctgcgcgccgcgaaaaccggcctgacgccggagaacggtccgcaaggggtgttcctgctggtcgggccgagcggcaccggcaaaacggaaacggcgctcgccctggccgatgcgctgttcggcggcgagaaagcgctgatcaccatcaatctctccgagtaccaggagccgcacaccgtcagccagctgaagggttctccgccgggctacgtcggctacggccagggcgggatcctgaccgaggcggtgcgcaaacgcccctacagcgtggtgctgctcgatgaggtggaaaaggcccatcgcgatgtgatgaacctgttctaccaggtcttcgaccggggggtaatgcgcgacggcgaggggcgtgaaatcgactttcgcaacaccgtgatcctgatgaccgccaacctcggtagcgacctcctgatgcagctgctggatgaacagccgcaggccagcgaatcagacctgcacgagctgctgcgcccggtgctgcgcggccacttccagccggcgctgctggcccgcttccagacggtgatttaccgtccgctgccggcgggagcgctgcgcgccattgtcggcatgaagctcgggcaggtaagtcagcgtctggcttgccattacggaatcaccaccaccctcagcgagagcctgttcgccgcgctaaccgaggcctgcctgctgccggataccggcgcccgcaacgtcgacagtctgctgaatcagcagatcctgccggcgctgagtcagcagctattgagccatatggcggcggggcagaaaccgcgccaggtgacgctggggtatcacgaagaggaaggcgtcgtgatggcgtttgacgaggggacaatatccgatgagtagcgtgaaatcgttgttgttcagccataaccaccacctgctttcggtgcagggatgtgaagccgggcttgatgtgctggccttcgagggcgatgaagccctgagccagccgttccgctaccgtattgaattcaccagcgcagaccatgccatcagcaaagagatgatgctgatgaaggcagcctccctgacgctgcaggcgccggtggctcagggcttcggcatcaatgttcagcaacccgtgcgggtgatccagggcgtggtgacggggtttgaaaggctcggtacctccagggatgaaacgcactacgcgctgacgcttcagccgcgcctggcgctgctcaaccgctcgcaccagaacgccatttaccaggaccagtccgttccgcagattgtggaaaaaatcctccgcgagcgccacggcctgcgcggtcaggattttctgttctcgctgacaaaaacgtatccgcgacgcgagcaggtgatgcagtacggcgaggatgacctgcgctttatcacccggctgctgggagaggtggggatctggtttcgctttaccgccgacacgcggctgcacatcgacgtcgctgagttctgcgacagtcagcagggctatgagaaggggctgacgttgccttcggtcccgccgtcagggcagcagtcggccggggtggacgcggtgtgggagatggcatgccgccaccgcgtcgtggagcagcaggtcagtacccgcgactacaactaccgcgaggcgacggcggacatgaacgcgcaggtggatgtcacccgcggggagaccaccacctttggtgaggcttaccactggggagataactacctgaccgccgggaatgtccatgaccgccatccggcgccggagtccggggcgttttacgcccgtcttcgtcatgagcgttatctgaacggccagacccggatgcaggccaccaccagctgcccgacgctctgcccgggacaggtgctgaaggtcaccggcggagaggaggtggccagggagtttgctgatggcgtgctcatcacggcgatgcacagccacgcccggcgcgatgccgactttgcggtggagtttgccggcataccggacagcccggacgtcggctaccggcctgagcccggcgcgcgtccggtgatggccgggacgctgccggcccgcgtgaccagcacccgggaaaacgacacctacgggcatatcgacaaacacggacgctaccgggtgaatatgttgtttgatcgggcgcgctgggaaaccgggttcgagagcctgtgggtccgtcagtcgcggccgtatgccggagacacctacggcctgcacctgccgctgctggccgggacggaggtggcgattggctttgaggatggtaaccctgaccggccgtatatcgcgggcgtgctgcacgactcggcgcacggcgaccacgtcaccatccgcaatgacaaacgtaacgtcctgcgcaccccggccaacaacaaaatccgcctcgacgatgagcgcgggaaagaacatatcaaggtcagcacggagtacggcggtaaaagccagctgaacctggggcacctggtggacagtgacaggcagccgcgcggcgaaggctttgagctgagaaccgacagctggggagctatccgggcacagaaagggatatttatcagcgcggacggacaggtgcaggctcaggggcaggtgctggcgatggagccggcggtcagtttgctgaaaggtgcggtgaatcaggtcacggaatggggaagcattacgcaaacccatcataatgttatcccagacaccggcccattaagcgcactgaccacaggcgccagcgatcttaaacagccgacattgctgatgtcggccccgcaggggattgccgcagtcacgccggaaacaaccctcctgcacagcggtaaggggctgtatctgcagagcctgggagaggtcaacatcaccacggcacagcgctgttctctgaatgccagccaggctatttcactgctggcgcaacaggaggggatgaggctggtctccgccaaaggtccgctgcaagtagagtcgcacggcgatattctatcgctgaccgcgctaaaagatatcaccgtccagtcaacccaggggcatctgcagttgacggctaaaaatggcatcaccctgggttgcggcggcgcatatatccgtcttaccccgcagggagagatacagatccacggaccgggggtgattagccttaaggggcagcatgatttgcaggggccggtcagcgaggagtttcccttgcctgagctaccggcatcggtgtgtaaagagtgccttaaaaaagcccaggcgctggcgcagggcttcgtgccgcgggaggcatagatgaccagacaatggattgaggaggtcgccggaacctgtcgggctttcggaacggattatctgcatgtcattatcgatcaggcgggggtgggtttttccgttattccggcgctgaattcgctgtcagttgagtggcagtcgctttttcatggacttccggaagcatttattgtcgatgatgctccgctggtggcgcgctttacgcttgatgatcttgagcaaatgcgctggttacaggatatcagccagcaacttgccatccaggcgccgctgctcctgttctgcacatattggcccttttcggcgctagcgaactggctcacgcagtgtatggatattctgcaggaagggcgcagcggaattttacgcttttacgatacccgggtatttccgctgttgtttacgcacattctcagtgacgagcagcaagagccattgatgcgtccggccctgttttgggcgtggcaggatcttgacggccaggcgaaaggcatcaagggcagtggtctcctgccggaacgcgatgaaaaggcgccaaaaatagaactcagcgatcgccagcttgagcatctgatgtgtatcagcgatgtcatcgtcatgttgtcgcactgtgctccgcctgcgggcatgtttgactcaagacagtcactgttttcggcctgttaccagggcatggtggaggcgacacgccagggtcttcttctggatgacgctcgtgaagactgggtaatgaagaagtggcttgccgacgtaaaaaccagtgagagaccttcagaatgaaaagcctggtctggctgagtacacccctctcttcattaccctcaaaccgacagggagagtccaatgaaatctgcattaatcagcccgctgctggcggggctgctgctgttaaccggctgcgcacagcctgccgcacaggccggaggcggcggtggcggaacaataaaagccatcaaccacacaaaatgggcaatcaaccacttcagtatcaacggccagtcgggcatcgattcaataggcccgtttcaggggggcggaggcggctgctgcttcagcgtgcccgcccgctggacgccgggtatgacggtgcgcgttgactgggaaaccggggtgggggatatggaaggatttcctggctttggcaatgatgaaaagtaccttgcctgggctaagaaaatgaaggcccagaaccggcagcacagcaaaactgtcccgctgcccgactataacggccaggatgtgtgcggcattacggtacactttttaccctgcgatgacgtgaaggtgaccaccagctgctggtcaccgagaaatgtgaactatccgataaaagagcccgtcaggatgacggagccggccgtctgtccgaagtagcccgccttcgtttattcaggatggcatcaccttcacttaatcaccctcaaaccgacagggagagtccgatgaaatctgcattaatcagcccgctgctggcgggtctgctgctgttaaccggctgcgcgcagcctgccgcacaggccggaggcggcggtggcggaacaataaaagccatcaaccacaccaaatgggcgatcaaccacttcagtgtcaacggccagtcggggatcgacattataggcccgtttcagggcggcggtggcggctgctgcttcagcgtgcccgcccgctggacgccgggtatgacggtgcgcgttgactgggaaagtggtgaggcatcgactgaaggttttcctggatttgctgattacgaaaaatataaagcctgggagaaaaaaatgagctctcagaatcggcagcacagcaaaaccgttccgttgcccgactataacggccaggatgtgtgcggcattacggtgcactttttaccctgcgatgacgtgaaggtgaccaccagctgctggtcaccgagaaatgtgaactatccgataaaagagcccgtcaggatgaaggagcccgccgtatgtccgaagtagcacgccttcgtttccccggggtgacatcaccatcccttcattaccctcaaccgacagggagagtccgatgaaatctgcattaatcagcccgctgctggcgggtctgctgctgttaaccggctgcgcgcagcctgccgcacaggccggaggcggcggtggcggaacaataaaagccatcaaccacacaaaatgggcgatcaaccacttcagtgtcaacggccagtcgggcatcgattcaataggcccgtttcaggggggcggaggcggctgctgcttcagcgtgcccgcccgctggacgccgggtatgacggtgcgcgttgaatgggaaaccgggcagggttcatccgcgggtttcccggggtttgctgatgaggcgaaataccttgcctggaaaaaagggattgatgcccaaaagaggcagcacagcaaaaccgttccgctgcccgactataacggccaggatgtgtgcggcattacggtgcactttttaccctgcgatgacgtgaaggtgaccaccagctgctggtcaccgagaaatgcgaactatccgataaaagagcccgtcaggatgaaggagccggccgtctgtccgaagtagcccgccttcgtttattcaggatggcatcaccatcccttcattacccccaaaccgacagggagagtccaatgaaatctgcattaatcagcccgctgctggcgggtctgctgctgttaaccggctgtgcacagccagccgcacaggccggaggcggcggtggcggcacaataaaagccatcaaccacacaaaatgggcgatcaaccacttcagtgtcaatggccagtcgggcatcgacattataggtccgttccaggggggcggtggcggctgctgcttcagcgtacccgcccgctggacgccgggtatgacggtgcgcgttgactgggaaaccggggtgggtgatacagaaggttcccctggctttggtaatgatgaaaagtaccttgcctgggttaagaaaatgaaggctcagaaccgtcagcacagcaaaaccgttccgctgcctgactataacggccaggacgtgtgcggcattacggtgcactttttaccctgcgatgacgtgaaggtgaccaccagctgctggtcaccgagaaatgcgaactatccgataaaagagcccgtcaggatgaaggagccggccgtctgtccgaagtagcacgccttcgtttattcaggctggcatcaccatcccttcattaccctcaaccgacagggagagtccaatgaaatctgcattaatcagcccgctgctggcgggtctgctgctgttaaccggctgtgcacagccagccgcacaggccggaggcggcggtggcggcacaataaaagccatcaaccacacaaaatgggcaattaaccacttcagtgtcaacggccagtcgggcatcgattcaataggcccgttccaggggggaggtggcgggtgctgcttcagcgtgcccgcccgctggacgccgggtatgacggtgcgcgttgaatgggaaaccgggcagggttcatccgcgggtttcccggggtttgccgacagggctaaatacaaagcctggatagcagacattgatgcccaaaaacgccagcacagccaaaccgttccgctgcccgactataacggccaggatgtgtgcggcattacggtgcactttttaccctgcgatgacgtgaaagtgaccaccagctgctggtcaccgagaaatgcgaattatccgataaaagagcccgtcaggatgaaggagcccgccgtatgtccgaaataactgaaacccatgccgcctgggtcccgccgccgtttccgccgcagggacgtctgccgggccgggcgctgcaggttgggcagaactgccatcagcagaacagcgacgagcggcgctatcatcaggaactgtgcctggctgccggacggcgcgtggatccgccgtgctgcaagacgctgcatatcagtctgtttttcgatggtaccggcaataacttaaatcatgacttttttatcgcgaacccgaaacatccgaccaatatcgcccggctgtttcgggcgactattggaacgggtacggctggcggggtgccgtctgacggtcagagtgagctgtttgatgatgacgccgagggggacgggaaatattttaaattctatatgcctggcgttggcacccccttcccggaagtgaatgacccggactattccaccatgggtctggtgggggcagttaagggggaggatcggattaactgggcgctgctgcggataatcgatgtgctgatgtttagtgccaccaaaaaatggctgaccaccacagagagtcgtcgttcactgaaagaaatgagcaccagctggaaccggctgtggtttggcggcagccataaccgctatgaagagttcactcgtttgctgaatgatttggcctctgatttgaagcccctgattattcagcctgagccgggcaagccgaaactgacaggcatcaagctgtatgtctatggtttttcccgcggcgcggcagcggcgcgcacctttgtgcgctggctgagcgaactgctgcccccgccggcggcggagggtgaaaaaccgccgcagtgcctgcagacaggcgggatgcggctgcccgtcagcgtggagtttctcgggctgctggatacggtggcctccgtcggggtggcgcatgtggtgccggttgccgacgggcatatgtcctgggcagacggcacgatggagctgccggatgatgaaacctatggcgggctgataaaaaaatgtgttcatctggtctccgggcatgagcagcgtctctgctttccgctggactcggtgcggcgggcaaacggcaaatacccgccctgtgccactgaggtggtttacccggggatgcactcggatattggtggaggatatccgccgggggatcaagggaaagcgaatggtaaagatgatgcattattgctgtcgcagattcctttgaacgatatatataccgctgcttttagcgcaggggctccattaaaagtaccacaggatacgctgccagagttttttaaaaatgatgcctggagaaaaatgccattagatttgttagatgcgttttttgttgatgaggctctggtcaaccgcttcaatgcctggcgcgaactcactctgggccaaaccacgccgaaaacgttcgatcccgaagcagcctctcactacgaaccacctgccgccggcggcagtctggaaaccgtcattgctgagcagatggcctggatcaccgcctggcgcatcgaccgctatgccagaggctcgatgctgaaaacgcccttctatcagcgcgccaagaataccgacgcgctgcctgccgcgcgtaaggcggcagaagaggttcgtgatgaaaaacaggcggcggtgctcagggctcgccagaaccagatagcaaaccagccccctgacaggatggatgagctggttttgcagccgggcgtgaaggattttgacccaaagatggatcaaacccagctgttcgacgcggcgaaggagttcggtaaggattaccacgacggttaccgtattccggataacctggcgcagctggtgctggataccgtgctgcagccggtgattttcgttctcaataccgatgatgaagcgcaggaataccggcgcatgaagcgtgacggagaggcccgggtggtcgtcctgttcccagaggccggggaggccagcaacgcggaacagcctgccgggctggtgagggcgctgtttgatgaccagatacatgactcacgcgcctggtttatgtatgccgcgctcggcacgcgcgagatgtggaccggttacttccgctaccggatgatttacttcagcgagcgctgcagtaaaccgctctcgccgctggtgctcgccggagacctggtgggttttgcgaccgtgaccgcgggtgtcgtgctcagtttccggcaaaagcgcctgaccggcaagctggccgggctggctgcgacaggcgccgtgcgctcgctggaggtggcggtgctggacaagataaccggggaagcgctgccggagctgcccggaggggcgcagctgcgggcatttacccacgagccgggaaccgttgtcgcacagcaaaaggcgcggaaagcggaagagcagctggcgcgggggcaagccgcgctgccggccagctggctgtaggacgttctgacgacaacggtctgaacgcggataaggaggatccaatgaataaagtcattcgcaaaggcgataccctgcgggagtatgggggcagggtgctgatggggcattatcagtgttttggtctggggttcgcctgcaagggcgacccggtcaagtgtaacaaacacggtatgacgaccattgctgaaggcagcgcacgaacaacgattgatggccagccggttgcgctgcacggtcatcgctgcgcctgcggctgcacgctggtcagctctaacccagactgcggggttgatcagtgaggccggtaccggagtatcccccgtacggagacgcgcgaccgcctggtacggccaggtggctatcggcttcggccctgctggtcctgcttagcggcggggtcagcgctttacttgcctcgtcagaagggaaaagcgccctggccgccaccgggatcctgttggctctggtgctggcaggtaccggctggttgatccggctgctgtactaccgcatgagcgtgcataacgccaggttctatgaccaactggtggcatacgaacaacagcaatggtgggcggagcatcggcagccgatcgggttacaggaaggtctgttactggggcccatgggcaaaacgaccactgactggctgcgggtgctaagccgtcaccagcgtccgccagaggaagagaacgagggcggcggcagggcgctgcgagcgccatacctttcagtttctgaggctatcgcccgcgaaaaacggctggcggaactactggtgatggaatggcaacgacagcgcagtgaaagaacgcttacgccgccgctgcgttgctactggcagggaacggagctcgcctggcaggcgtttcgtgcacagatgaccctcactgttgcgcagatgacactaccctcacgcccggatgcctggcgtggggaggccagcctcgcggagatagcacacgctctggcggaagctgacccccatgacactgtgcttatcgccggatgtcaggtggttgtcgcccagccgggggccgtgcaacccgccggagagtctgcggtactgtggctcgccggacgggacggtccggtgcacctgaccaggggggaaacctattgcgcagaaaaaggggaggccctgactgctgtagccgctcgtgtgctggagcagaacgaactgagcggccccccggaagcctgtgcgctgttttttcagccgggactggaagcgctggcgcacagcggatgggatattaacctgtatcgccaggatgcctgttggggagacatcggcgagatggaaggcttgaccgttctgtcgctggcggcgatctacgccgcgcactaccaacaaccgtgtggctggctagcccgcgatcccttgaataccctcgcaattggaattgtaaaacctgatggacaacgtcaataaacctgccgctatctctgtggcggctacggttatcgtctgtattgctgcggtcacgcttctggtgctcctgggcgggctggcatggtggctatgggcgatggatcgtgccacgcagtgggaaacgctgcgcccgcttatcgccacgggctttattatctgggggatggcactcagcctgctggtactggggtttatggcctttcgactgctgataaaagataaggttaagccttcagcagcgcctgtgcggcaacccaccaggcctgccgggggcgaagccctttatgccccgctgaaaaagcaccttcacgcacgttaccgcctgcactggcggcgcaaagtccgcctgcttttagtcaccggcgacgaggcggcaatcgaacaactggtgcctggcctgcgtcagcagcgctggctggagggccagcgtaccgttctgatttacggcggcagtctgctctccgagcccgacagtgagcaatatgccgcgctgcgcaagctgcgccacggtcgtcctctggatgggattgtgcgggtgatgccgtcgtctctcaccctgacgccgcagataagcgagagcgacctgcgcgggctggaaaaaatcagcgaactgctgggctatgccgccccggtctggttatggaaactgtgcgacagtgagtggccgcaggctgaccgcgcggagcaggcggtaggggttagcttcccgttgcgcgccactgaggaagatgtcgcccgtcagcttgcgcagatgttgccgacgctacgggagcaggggatgcaccagatcgcagcagatacccgccacgacttcctgctgcgtctggggcagcagcttatcgacggggagatcgcacaatggcgccggcagctggcgccgtggctgaccgcctcgcggcagcggcttgcgctgcgaggcctgatgtttagcctgccagagcctcgtaccgtagatccgtatcaggaagctgatgccctgcctgcgagccagcctcacctcctgacgcttcccgccacctggcaggggatcgtcgatgactgccgccgtttacgcgggcatcacgtgggaatggcatgggagcggggcctggcgtgcggtctgctggccatcttcggcctgtgggcggcgggactgctgctctcctttgccctcaattacagtcagattgcttcggtagcgggaaaagcccgcgacctggtggcccacccctccgtttctgactatcaactgacggccctccatgccctgcgcaatgaggccggccgtctcgtgcacgatgggcagaatggcgctccctggtatcggcgctttggtctggaccatcatcagcaactattagacgccgtcctgccctggtacggtgtggcgaatcatcgcctgatacgtgacccggccaatgccgcgttgcagcaggcgctcagcgcgctggtcaactccgcccccaatagcgaccaacgagcccagctggcgaaaccgggctatgaccagctgaaagcctggctgatgatggctcgtccggataaagccgatggcgcattttttgcgcagaccatgaaaacggtccagccgacgcgaatggggatctcgaccggtctgtggcaaagtctggcgccggatttgtgggccttttatctctccctgctgcccgagcggccagagtggaagatcatcccggatgcgcaacgggtgagtcagagccgtcaggttctgttgcagcagctaggtcgccgcaatgccgaaagcaccttatatgagaacatgctcaaatccgtgcgtcgtaattttgccgatgtatcgctggaagacatgaccagtggcaccgacgcgcgccggctgtttaccaccaatgaagtggtcccggggatgtttacccgccaggcatgggaaggcggcattcagcaggccattgataaggcagccagctcgcgccgggaggaaatcgactgggtgctgagcgattcgcgcaaaacgatgtcgacagacctgtcgccggaggcgctgaaagcgcgtctgacccgacgctacttcaccgatttcgccggcagctggctgaattttctcaacagtctgcgactcaacccagcgaccaccattgccgatgttaccgaccagctcacgctgataagcggtgtccgccagtcgccgctgattgccctgatgaatacccttgcctggcaggggcaggcggggcaacaaagggaggggctgtcggacagccttattaaatcggccaaagatctggtgggcgggaaagacaagccggtcatcgaccagtcggcagccggcccgcaggggcctctggatgacacgttcggaccactgctccagctgatggggaaaaacacgggcagcaacgtcatgtcggccgatagcaccctgagcctgcaaacctatctgacccgtatcacccgcgtgcgcctgcgcctgcagcaggttgcgaatgcctccgatccgcaggagatgatgcagaccctggcgcagaccgtcttcctggggaaaagcgtcgacctgaccgacacgcaacagtacggtagcctgatttcggcaagccttggcgaagagtggagtggcttcggtaatactctgtttgtgcagccgctgactcaggcctgggaaaccgtgcttctgccgtcggcggccagtctgaatgataaatggcgccgttcggtggtcgccaactggcacaccgcctttgacggacgctttccgtttgccgccagcaaaagcgatgcctccctgccgatgctggctgagtttgtgcgcaaagacagcgggcgaatcgaacgttttctcacgacggagctgaacggtgtcctgcataaagaaggcagtcaatgggtgccggataaggtcaacagtcacggcctggtctttaatccggcctttctgcgcgcgatcaaccagctaagccagctgtccgacattcttttcaccgacggcagccaggggatcagctttgagttacaggccaggcctgccccggaggttgtcgagacacagctgacgatagacggccaaaagttgcgttatttcaatcagatggccgactggcagactttccgctggccgggggagacgtataaacccggcactctgctgacctggaccaccgtcaatgcgggcacgcgtctgttcggtgactacagcggtacctggggctttattcgctggctggagcagggtaaacgccatccgctggatcgcagccagtggatgatgagcttctccgccccggatggccgcaccctgcagtgggtattgcgctcccagcttgggagcggcccgctggcgcttctggcgctccgcggattgaccctgccggatcagattttcactgtcgatgcggctgagagcgcacaggccctgacgacgggggtagggaatagtgacatggatgagatggaataatgagcattttacaaaatttggttgccgccagtcagttggatgaaagcgcactgcgccagcaggcccggtcacgccaggcgcagtggcagtcctggcttgcgccagtcagtgacgcccaaccaaccggggacgatccgggctatgacgatgattttcagcgtatccgcgaggaggtcaataagatctccggcgtcgataccgaactgatttgccagctggcagaaaaactgctgactcagacctgcaaggatctgcgcgtgatcaccttttacgtgtgggcgcgtctgcagcgggatggtgaaaccggtctggcggagggcgttacgctgctggcggcaatgcttgagcggtttggggctatgctccatccccagcgtgaacgtagctgtaaatcagcgctggaatagcttggcagtcgccggatgtcggacagtctgtctctttatccggaagtcgacatgaccactatgcaggtcattatcggggcgttattgctggcggaagccactttttccggcttggctgaagcatctcgccccgatctttccgggctatatcagatactggagaaccgcctggtgcaaagcggcggagcccacagtctggtgccgcagaccagccgcgaagaacacgatctgctaccccaacatacggacaccgcaccggtaatgcataccgtcacgtcaggtcgtgatttgctcgatcaggctaaggtgctggcgaaatatctgcgcgagtgtcccggcggatggctggcaggtcatcatctgatgaagagtgtgcgttgggatacgttaacggagttaccgccgctggatgcctccggccggacacggctattgcctcccaagcctgagagtaaagcccatcttaagcggttgtatttacagaaaagctggtcggaactgctggagcatacggacacgctgttggcgcaaggcgtcaaccatctgtggctggatgtgcagtggtacgcctggcaggcgctgctgaaactggatgctgacagtgtacgggccgatatcctgtgccgagatatgaaagggctattggctcgtctgccggggctggaaaccctggcgtttaacgatggtacgccattcgccgatgaagttacgctcaactggcttaacgaacgtgtcctggatgagatggccggatggcaagatgagccggtaatggcggcgaccaccgctgatgaggtgctgtcgctggagccagaagtgctcacccgcgcggacgatgaaggtattgagtcggcgctgaactggttacaggcgcagccgggctataccaccagccgcaatcggtggctgatgcgcttactgatggcgcgggtcagcgagcagtacggaaaaaatgaaatggcgctgcatctgctggcggaactcgacagccgcgcccgggaaatgacgctcgaacaatggaagccggagcttatctttgaggtcaaagcccgccgactccggctgctcagaggcaaggccgggcgcagtgaggcagaaaaaaatcgcttgctgccagaaatggagtcattgcttgccgggctcatcgctctggatcctgctcgcgccgcggtgctgtgcgcataattcacgcatcattcacattgcactccctgcacctgcggttctctgcatatctgaaagctattactcattctggtgatttatggacgatttaaccctgcgttattacgacgctgaaatgcgctacctgctggaagcgggtgaagagtttgcccgcgctcatcctgagcaggcggcaatgctcaatctcgacaaagcgggcgctcgcgacccctttgtcgagcgtctgtttgaaggttttgccttcctgatgggccgcatgcgcgagaaactcgatgacgatctgcctgagctgaccgaaggcgtggtcagtctgctgtggccacattatttacgtaccattccctcgatgtcggtcgtggagttcacccccgactggccggaaatgaaagagccgatgacgatggccaaaggctttgaagtgctttcccggccgatcggtgaaaagggcacgcgctgccggtacaccaccaccaaagcgatcgctctgcagccgttatccctggaacgcgtccagctggccaccgatacggatggccggtcggtgatcacgctgcgctttacctgcagccagctgacggactggcgccgggtcgatctcagtcatatcccgctgtactgcaacgccgatgcgccgctggcctgcgccatgcacgaggcctttaccctcaatgtggcccggatgtggctgcgcatgcccgaagaggtggacagaaggccgctggacgggtatttcagcgcgctgggatttggcgaggatgacggcctctggcctgaagatggccgcagttttcgcggttatcagctgctgctggagtattttaccttccgcgaaaagttcatgttcatcgatctgcgcgggctggagacggtggcttttccggccggactggcgtggtttgaaatcgacgtcgtgctggcggaacgctgggaacatgacttccgcttcagcgaaaagcagctgcgcctgcactgcgtgccagtgatcaacctgtttccgctggagtccgatccgctgaccatcaattccctgcagaccgaatacccgctgcgcccgatgcgcgtgcaggacggccacaccgaaatttacaccgtcgattccgtgatctcctcacaccagcaggtttacgcgccgttctcaagttttcgccacaaaggcggcatgatgcgtcatgacgcggcggactattactatcatacccgggtgcgccgtggcccctccgggctgtacaacacctggcttatcgtcggcggagaagcctttgataatcataccgtaccggaagatgaaagcctgtcgctgaccctcaccggaaccaacggccagctgccgcgtcgcgcgctgcagagcaccgtgctcgatacggtgatgaaaaccacttccgccagtattgcagtgcgtaacctctgcgcgccgacgctgccgtgctatccccccgcccaggaccgttttcactggcgggtgctgagccatctgggcagcagttttctttccctgatggataacgcggaggtcctgcgcggcaccctggcgctgtatgaatggaccgacagcgagatgaatcgtcggcgtctggaagccatcctcgacgtgaagcaccgcgcaacagagcgctttgcacagggccatctggtgcgcggcgtgcagattgaagtcaccctcgacagtcacggctttgccggacgtggcgatatatgcctgtttggcgagatgcttagccgcttcttcgcgctctacaccgacatctacttgttcaaccgcctgattatcattctgcaaccaaccggagaacgactggaatgggaagagaagcacagccgccgcattcccggctgaccccgcgactggaggccgacctgccgcggatcaatttttaccgcttctgccagcttctggaaaaacggcgtcccggccaaccactgatggggggaaccagccatccggctgacgatccggtgcgtttttacccgcatccgggaatgggatttcccgccagcgaactgaaagccgtggaatacgatgaggccgatgacagcaggccgccggtcattcgcaccacctttatggggttgtacggtgtcgattcgccgctcccgacggcatatctcgatgatatcgcccagcacagggaagggcatgaagcgctgcagggcttactggatatcttcagccaccggatcatgacgcagttttaccgcatctggcggaaatactcctggcccgccacctttgagcccggcggcaccgatcgtctctcgcagtcgctactgggcctggcggggctaggcatccccggcacgacgcagcatatcgcctcgccggcgtcgcgctttctggcgctaaccggcgtgctgcgtcagccgggcaaaacccagcaggggatccaggcgctggtcaccctgctggccccggagaccaccgtcagggtgagcccgtacagcctgcgtccggtggcgatcagccagccgctggggttttacggcgatgacgacttcttcctggacggcaatacgccgctgggtgacgaagcgatggatgccagcagccagctcctcgtcgcccttaccaccgacaatcccgcggaggcgcagggctggaagcctgacggcccgctgtttcgggactttctcatcctgctgcgggtatacctcggctggcgattccgggccaacatcaccctgaccgcgccgacccgactgctggctgtcccgccgctgggggacgagccgttctggctcggtatgaacggcgtgctgggcgtgggtgatggcgagagtgagggcgatattcctcagacctttaccaccgagctgggtacctatacgggcctgcagcctgccacctttctacaaggaaaccgacgtgttacgtataagtttgactaaaaccgcctgtctgctgcccctgcttgcgctttgcctgagcggatgcggactcacccagcgcgtctcggagggaacaaagtctgccttcaacgccgttttttataagaaaattaatacgctgcatctggactttaccgcgcgcgaagcgctcaacaccgatgccagagagaatcactcgctctctgaaccggtggtggtgcgcatctatcagcttaaagatcgccagacctttgaccggctggtttaccagcagctgctggaggagggggatattctgctcgccgccgatctcctcgccagtcgcgatgtggtgatcggtcccggaggggacgccagtctgaatatgccgctggaagcggaggcgacgttcgtggcggttgtcggcctgttccgccatccggacacacaaagaaatacctggaagcaggtgctggcgcgtgaggaattggatccggacaagccgcgcattttcaccgccgaacacaaccagctacggctcaggcctgaagcggcgaagtaacgtaaaaaaaaacaaacatttgcggcggggccatcgcgccagttcgccctcaatcttcgtaaccagcgaacgggcgataaccatcttcatccagcccaaccggtttcatcacagcacagggagataacgtgacagcgagggaacgtttttttaagaaactgcagcaacagcaaaatccgcggcggacagcggccctcgacgggtcggccgccgcggatatcgccaggtttcgtcagcagatggcggagctggctcagcagataagtcagtggtttgatggaaccggtattgaggtggtgatttcgacccgccatctccacgacctgagtacccttggctacagcctcaacagcggcatctgccgctacgatatcctggccattcgtctgcaaaacggcgagcgcagcgtcaatatcgtgccgcagcagctgttggatggcgtggaaaaggggatcgtgaccctgagtcttgaggcgcccgacggcgcgggatcccgggaggtgttttatctgagcctggccccggaggagggctggatgatccgcaaggcgcaccagcccccggaagcgcggcttatacttaccgaagatcgcttttttatggcggtagacagcctggcctgaagatccctgacaggcgatgacgtccccgcggcggcggtgcaaagcgcgcatcgccgccctgaggtatcaggcgccaaacgctccgtcgatggtgtgcatggcgccagtgacaaacgacgcctccggaccggccagccacgccaccattcccgccacctcttccggacggccatggcgcttaatggccataaagctgtgcatcagctctttcatcgggccgttccccgggttggcgtcggtatcaattgggccgggctggacgacgttgaccgtgatgccgcgcgggccaaaatcccgcgccaggccgcgcgccagcccctgcagggccgatttgctgagcgcataggccgccattcccggcaacggcatgcgatcgccattgactgagccgatgacaataatgcgcccgccttccggcatgcggcgcgccgcttcgacggaggcatggtagggggcgtgaatattgatgcggaacaggcgatcgatggcatcgctgtcctgctcgagagcgtcaccgaaaagcgcgatcccggcattgaccactaacacgtccagcgggccgctgtcgcggaccaggcttatcaccgcatcgcgatcggcgctgtccgcctgcaccgccgtgctgccggtctctgccgccagccgctcggccgcttccggcgaaccggaatagctaaacaccaccgacgcgccatcggcgacaaaacgcctgacgatcgccgcgccaattccccgactcccgcctaaaaccagcactgatttgttgtgaaacgctgtcatatcccacacctcatgatattgtagtgatgattacaatatgctgcggcaaaacaggctgtcaaggattaatatagtgaccactacaaaaccagggcgcactccgggacgtccccgccagtttgatgcggaacaggccattgaaacggcgcaacgcctcttccacgcgcgaggctacgacgcggtgagcgtggccgatctgacccacgctttcggcatcaaccccccgagcttttatgctgctttcggcaacaagctcgggctgtatacccgcgtcctgcagcgctacagccagaccggggccattcccatcgatgccctgctgcgagacgaccagccggtggcggcgtcgctcatcgccgtactgcaggaggcggctcgccgctatgtggccgatccggccgccgccggctgcctggtgctggagggggtacattgtcaggatgctgatgcccgggtggcggcaggcgaatggcatgctgcggcaagagccaaaatccagcagtatatcgcccgccatcgcccgcaggacgcgctgcgggtgactgactatatggatacgctgatgcttggcctgtcggcgaaagcgcgggaaggggatagtctgccgcgtcttctggagaccgtgcggctggcaggcctggcgctggagcgcatcctgccagcctgagtcgtcagatggtttgtccgcccgacacctcgatccgctgggcggttacccagcggttatcgtcgcgtagcaggctggcgatcatcggcccaatatcctcgggaacgcccacccgtcccagcgccgtcatggcggcaaactgcgcgtttacctctgcgtcgtcccgcaccagcccaccgccaaaatcggtggcgatagcgccgggggcgatggtattgacggtgatgccgcgcccgcccagctcgcgggccatgtacacgctcagcatctccacagccgctttggcggcggcgtaggcggagaagccaggataggagacgcgggtcagcccggatgaaaagttaacgatccgcccgccgtctgccagcagcggcagcagggtttgtacgaggaaaaatacccctttaacgtggacgttaaacagcccgtcgaactgcgcttcgcgcgtttcggccagcggggcgaattcgccgtgccctgcgttattgatcaggtggtcgaaagtggcccgcccccagacgctggccagcgcgctgccgaggctgtcggcgaaggccgggaagctggcggtttgcgccatatccagcggcagggcgatggccttgcggcccagggcgcggatgtcggcgaccaccgcttccgcctgttcgagactgccgcggtaggtgacgatgacatccccaccctggcgggcgatatccagtgcggtctgacggccaaggccgcggttggcgccggtaataagtgcaattttagtcatgttcggtcctctctggtgtgtggagtccttacaataggggaggatcaccgggccgggttgcccaatccttgttattttttgcccatttctctccgttcgctcccttttgccgggaaatagcgcatactcaggctttaaaacttgcctgaaaggatcttatgcgcgacgctctgttcgatctctgccgccggtttgccgatgctcatgtcgatagcagcggggtggcagttaccccggttcccggtattactctggtgcgggccctgcatcctggtgacctgcaggcggctatcgccaggccgctggtggccatgctgctccaggggcgtaagagcgtgaccaccggcctggcaagctttgactatggtccgggcgaggcgatggtgatcgccgcggatgttcccactaccagccagatcaccgaggccagtcagcgttttccctattacgcgctggtgctggagctggacctggctatcctgcgcgagctgcaggaggccgggccgtcagggccggatgaggcgccccgcgttggtatcgaaccgatgaacgccgatgttacggatgccgcttaccggctggcaaggctgtttgatcaaccgggggcgctggcggtgctgggggaaggtctgcggcgggagctgcattactggctgttgcagagtgtccatgggccggccatccgggcgctgggcgccgtagacagccattcggcgcggatccgccgggcggtggcgatgctgcgccgggattttatgcagccagtcagcgtcgacgcgctggccgacgccgccgggatgagcgtctctgtctttcaccgtcatttccgcgccatgaccacgctgtcgccgctgcagtttcagaagcagttacgcctgatccacgcccgccgcctgatgctggcggaagggatgagtattgcacaggctgccggggaggtgggctatatcagcgtgtcgcagttcacccgggaatacgctcgcctgtatggcgcgccgccgggccgcgatcgtcgacgggaaaaaatgagcgcctgacctggcgcgcgggctgccggcagctcatccctgagcctgacgccggtggtttagtccgcgattttcgccgtgatatgcactttgttgcccattcgcgcttcagtgatgcgataggtagtcacgccctcgcgggcggcatgctggcggattttgctctccgcgtggtccagggtatcgccggtggcggtgatggttctggcatttgccgccaggggcagcagacaactcaatacgatcagtggaattaacttgttcatcgtcattctgtcctgtgagagaaaatcagcgcgcggtctgcagccagccggcaatgtcctgggtcggcagctggtggcgggcattccaggtgtcgcccatcggccaccacacgccatccccccgggcgaaggcggcgcgatagcgcagcatggcgtcatccgggtttgtccgcagctgctccagcagggcgggcagggtgtggacggctttgctgaacgtctgctgcgttacgcgctccacggtatccgccaactgccggtaagaggtcgtttcgccggcaacaaacaccacctcgttgacgatccgcggctgatgcagataaatcgccgtggtcaggcggccaatatccgccggtgaggtgacggtcacctgggtatcccagctgccaagggcgtgaagggttcggttggataaattcactacatcgaagtctggttcgaagagaaagctggtaaacatcccggtggagacaatgacccactccgtggcccgctgcgcgcgcagcagggtccggacatcgtactgctcgtcccagaccggctgaccgctgcctttgcctaccacatcgtaattgacgccaaactgccagggaaaatagcggggtaccccggccgccagcaccgcgcgggtaattttcagctgtgtccccggaccggcgacaaaccccatgcagttaatcacggtggtgaatccgcgaaactgatcggccagcgtctccatggcgctaccggcgatgtcgacggcgaggaaggtggctccggcgtcggccagcgcctgatggtttgccgaccgcagctggccggcttcatcccaggccgccggcgagacgatgaccgagaccgtgccctggcgctcgattaccgcaggcaccagcgcatcgagaacggcggcgcccagttgtcccgctcccagcaccaataccttttccgcatgattaaaattatcagttttcattttaactccttgctcagttaagccttgtgttgacgggctacaggctcagtgtagggggacggtcgacattcgataagtacagcgtttcgggttagactgttcgtaatattgggataatgagcgccgggggggtaacgaaatggacaaactggatgccatgcaggtctatgttgcggtcgtggatgcccacagcttcgcccgcgcggcggaggtgctcgggcagccgcgctccacggtatcgcgggtggtgaaggagctggaagccttgctcggggcgcagcttctccagcgcaccacccgcaagctcagcgtgacggcggagggtcgccggtattatgaggagtgtaaaaggctgctggccgagatggcggcgatggaagcctcctttcccgggcgctcggctcagcccgccgggcggttcaaggtagggatgccgcaatcccttgcccgccactgcattctgccgaggatcggcgagtttttgcagcagtatcccgacctggagctgatcctctgctcaagcgacaacgtggaagatattattcaggagggattcgactgcgtgatccgtaccgggcggatcgaagattccaccaccctggtggcgcgtcctctggcccgctaccgctggatggtcctcgcctcgccggcctggctcgcggcccacggccggccgcagagcatcgacgaactgcaccagcatcgggcggtgggctacctgaatcaccgtaccgggcggaccatcgactggcttttctccctcgatgaaggcgactgcgcgatccgcatgcgggagacactggtggtcgacgataccgatgcctacattcaggccggcattcaggggctgggcctgatccgcgtcgccagctatctggcgcaaccttatttgcagagcggggcgctggtcgcctgtctggagcaggccgcttctgatcttcccttgtcgctggtctatccgcaaaaccgctatctgccgccggcggtgcgcgcgttttatgactggagcaggcgcgtgctgcaacccccgcacagcgaggcctgatgccggggcatcggcccggttattggccgcgcatggcctgttttaacttcgtcaccagccagttcagcgccggatcctgcgcccgccgtttgtgccgcaaaatgcacagcgtaaattccggatacgctaccggcggagcgtccgcgcgcagcgcatactgcgcctgccagcgctgcgccagcccctgcgggacggtggcgaacagcggcagggtggtcagcagcaggggaaaggtggagaaattctgcgtggcaaagcgcacgcgccgcgcgagtccctggctggcgagctggcggtcaatttcaccgtggccggtttcgcgataggccaccatcacgtgttcccaggcgacaaagtcgctcaccgacagcggaccgcggcaggggatctgctgcggcgaccacagggtggtgactcccatggacatcaccggctcgctgacgatctccccacggctctgtttgttgacagacaccgcgacatcaatgcgctcctcctccagcaactggcgaacctggaaggggtcggcggctatcgactgcagtgagactccgggcgcctcctgcatcagcccgggtaacagcgggggcatcagccagtgctcgctccagtcgctgaggccgatgcgaaaaagctgctgcgcgcgcgccgggacaaactccccggcgccaaacatcgccgaatgcaggttttccatcagcggctgcaggtcggtcatcagcgcttgcgcccgcggcgtcggcagcatgcctctggcgctgcggacgaacagcgggtcgtcaaacatctcgcgcagccgtttcagcgccccgctgatagccggctggccaagatgcagtacctctgcggtgcgggtgacgctcccttcgcggtacagcaccatcaagactgtcaacagattcagatcgatacgactaaaatcattttcaatgattttgttcattatgataatcaatttgaatgtgggttatcccggcagcatagtgaatatcaccccgataaatcaaccagcgcaatgcgcgcggagggagtgatgcaaacttaccagacaggcgatagcctgattttcaaagtgccggagcgcgagatttccctgcagccggcggcgctctatccagaggcgttcccggtagcggaggcggaggccgttattcagccgattgcgctgtcaatccacagctgggtggtgcagaccccccacgatctgattgttatcgataccgccaccggcaatggtcgggagcgcggcggcaatccgctctatcatcaacttaacacgccgtatctggagaatctccgcgccgcgggggtgaacccggaggacgtgaccctggtgctactgactcacctgcataccgaccatgtcggatggaataccgtctggcaggacgatcgctgggtgccgctgtttcccaacgcccgctatctgtgctcggcaaaagagctgtcgcgggtgaaaaacagcgaacgctaccgggcgctgtggcttgacagcctgctgccggtgattgaggccggccagctggagaccgtcgatgtggcgacccggccgcgggtcggcggacggatcgactttattcccacccccggccacagtccggaccatgccgcgctgatcctcgccgccggtgatgactacgcctgtttctccggcgatcttctgcattccccgatccagtttgcccatccgcagtggaattcagcgttctgcggcgatccccggcaggcggaagtctcgcgacgggagatgatggcgtggggggcaagccatcatgctcaatggttcaccgggcattttgccgggccttcctgcggctggctggagaaggataagcaaggtgactatcgctggcgagaggccgggaaacaggctgcagataaggggaacagtgatgaataatgcgcaaaccgtgttggtttttggcgccaccggtcagcagggcggctcggtggcgcgggcgctgctgcaccgcggctggcgggttcgggcgctggtcagggatcctttctccgccggggccgctgcgctggcggcgcggggagccgagctggtggtgggtacctttgaagaccgggcggcaatgcggtcggcgatggccggggtcgacggcgtcttcagcgtccagcccagttcgccgggagggacggtgaccgatgagcaggaggtacgctacgggataaccatcgccgatctcgccgtcgagtgcggggtgaagcatctggtttacagctccggcagcgcgacgggggagacgccgaccggcgtagcgcattatgacaccaaagcggaaattgaacggcatattcgccgcctgccgctggcggcgaccatcgtgcggcccgccacctttatggagctgctggtgatgcctggttttggccttgatgaaggtcgttttcaattttttatgttgccggaggggagaatgcaggtgctggcggtggaggatatcggccatcttgtcgcggcggtttttgccgcgccggcgcggtttgccggcaagacgttcgagatcgccagcgacagcgtgaccggtcgtcagctggaggtgttattctccgcggcggcgggacggccgatcccctattcgcgattttccgacgaggtgctggccgccagtccttttctgcacaagctgaccgggctggtggacgacgggcggctggccgggcacgccgacctcgacgccctgcgccagctgcacccgcagctgcacaccttcgccggctggctggcaggccccggccgtcccgccttcgagcgggcgctgaccagcggggctcgctgggcgtttgatcgttaaaggctggtgttctggttacccgccaggcgcgctgtctcgtcggtgaccggccgccgctagccggcagtcaggatcgcgtcggccagcaccgctaaaatccgctctgcgcgcggggcatgggacggttgctcccgcagccaggcaagcgcggcgatcagatcgaacagctcctctccgctgagatctggccgtgccagcccggcctgctgcgcgcgggtaagcagcgacgtaccggcggcgcgcagggcaacgcaggcgctgtgcagggcggactcaggatcgtcgatggcgctcatcagcggggcgatgatcccgcgatgctgatgggtaaacgccacgctctcggccagccactccagcagcgccgcggcaggatcggcggcgagcagaagcgactcagcccgggcggttagcgccgcaaagcggctgcggagcacggcttccagcaggctgtcgcggttgggaaagtggcgatagagggttcccattccgacgcccgcccggcgggcgatatcgcgcagcgaggcctcagcgccttgctccacaaagacgtcccgggccacctcgatcaacaggtcataattttttctggcatcagctctcattggcgttccttgacaatcggagcactgctccatatattcggaacagtgctccgttaaatataacgcatttccatatgaggagaaagcgatgtcgacgcagatgatgaaggccgttcaacagcacgcctttggcgggccggaagtcctgagctatgaggatgcgcccatgccggtcctgcaggccggtgaagtactggtacaggtgcacgcggtgggcgtgaacccgccggacagctatctgcgcgatggctatcaacagctgcccccggagtggcggcccgaggtccgctttcccttgatcctcgggaccgatctctccggggtggtggtggcgcgggcggatgacgtccgggaggtggcggtcggcgacgaagtgtatgctatggcgcgttttcccgaaggggcggcagggggcagccgcgcttacgccgagtacgttagcgtgccggtcagcgacctcgctcgcaaacccctaaccctgagccatcagcaggctgccgcggtgccgatgtcgctcctgaccgcctggcagttcatgatcgatcccgggcatgaggtggcgaatccgctgcagccggggccgcatcggccggtgccgctggcgggtaaacgcgtcctggtcaacggcgcggcagggggagtcggtcatttcgccatgcagttggcgaagtggcagggcgccgaggtgattgccgtcgccgcgggccgccatgaagcctttttacgtcagctcggcgcggatagcgttatcgactatacaaccaccgcagtggaagagacggtgcgtgacctggacctggtcattgatgcgccgggcgggccggccagcggccgttttttgcgtaccctgcgacccggcggcgcgctgtacccgatctttccgctcggctttgccggggcggaagaggcgcgacagcgcggagtgacggtctcaaccacccaggtacgctccagcggcgcgcagctcgcccggcttgccgacctgctggacgccggggtcatccaggttgcaattgacagcgttttcccccttgcgcaggtgcagatggcgcatgagcgagcagcgcaggggcatcttgagggcaaaatcgtgctgtcggtgatggactcgtcagccgggtaatccccgacggccagggttgcgtttttgcttctcccggcggcggactaaaacagcgccagccgggcaagacggtccagcgcgttgctcagcgcctcgtcccctgcggtcaggctgatgcgaataaatccttccccccctgcgccaaaaccagtgcccggcgccaccagaatatgcgcttcctgcagcagcagacgggcaaactcctgcgaacggtagccgggcggtacgccgagccagaggaagaaagtgccttgtgcgtcacgcgccggccagcgcagcgcagccagtcgacgcagaacccactcccgacgttgatgatagaccgccgtcagctgcgtaatccgttcggccggcaggttgagcgcggcgatcgccgcatcctgaatcgcgccaaacaccgtactgtagctatgggtgtgcagctttttaaacgcccggataatcgaggcgttgccgaccgcgaagccgaagcgccagccggccatattaaaggtcttggaaaaagtataggtttccactccccatgctttcgcgtcgggctgggagaagaggctcagcggcgcatcgctggccgcgctgccgatggccgcataggcaaaatcatggaggatcggcacctggtgacgacgagcaaactgcagcgcgctggcgaacagcgccggcgtggcgagggcgccggttggattatgcggatagttaagcaccaccagcccggccttgtcagcgacttcccggggaagatcgttaaaatccggcaggaaatggttctccgccctgagcggcaggccataaaacgccgcctgggactgcagcgccgccgagcggtaaatcggatagcagggatcggtggagatgaggtattgcccggggctgagcagcgcccgcgggatgccgcctataccgatatgcgacccctgaaacacggcgatttcgctgtgcggatcgagttccacatcatactcccggcgatagaaccgggcgatcgcctcgcggacctgtggtttgccccagaacgacgggtagccatggttttcacgacgatgaatagcgctctgcagcgagtcgattacttccggcggggtgggttgatccggactgccgctggaaagatcgatcagcggcagcgcttcggtgttgacctccgcggccagtttttccagcaggctgaacaaattctcttccagggcgtccaccagcggcgaagcagtaaaatcaggcataacattcccggtttaaatcacgaataattgaccatctttaagggatttatagcggctggctaaataacaatatacgcaaaagattcttgtttttaagatatgtcggtatagcaaaagttaatgaggaattagcaaaaggaaattcggcgttctggcttacaacccacagtcggctgtgatttaatcgttcaatatcgccaaccctccaggaaaataccttatgaacaagtcagttgcgcgcgggatcgctctcgccctgttgtcggccacctctttttatgccgccgccgacgctcatcttatccgcgtcggctttaaccccgggccgtataaagaacaatttgagaaaggcgtcgcgccctatttattgagtaaagggtataaaatcgaatataaggatttcagcgacggtattcaggtgaatgacgcggtagcccgcggcgatatcgaagcgaatattatgcagcatccggtatatctgaaagcaattaatgagcggctggggatcgataacgtgggcattgtgcaggtccccacgccgccgatggggctgtatggtgggaaactgaccaccctggggaccccggcggcgggcaccgtcgtgtcggtaccaaaccagccgtcaaatgaatatcgcgcggtactggtgctggagagccttggctgggtgaaaattaaaccagacagcgatccggccactttttcgcagcgtaacatcgtagataatccttacaaaattgtcctaaaagagatggataatgcccagcaggttcgcgctctgccggacgtcgactatggcctgattcagggcaattttgccgtctccagcggtatgtccctgacctcggcattaaagctggaagcagccaccagccattttattaatgtcgtgaccgtcgccggtaaaaatcagaaggcgcagtttgccaaagatattatcgatggctaccactcggccgagttcaaaaaatatattctcagccatccgcagtatgatggttacctgctgcctgactatttaaaatgaataacgcgatgatagaatttcgccacgtcagtaaaagcttttccaggaaaggacatccggttctggccttgcaggatattaatctcagcattgagcgaggcgatatttttggcattattggctacagcggggcaggaaaaagcaccttattacggctgattaatcgtctggaaacgcctggcgagggcgaggtactgttaaacggcgagccgctacaggcctgcagcggccagcgcctgcaggccatcaaaaaagatatcggcatgatctttcagaattttaatctgctgaattcgaaaaccgtttttcataacatcgccatcccgcttattttacaggggcgcgacaaggcctttatccaggcgcgggtggcggaactgctggcgttcgtcgatctgagcgacaaaatccacagctaccctaatgagctgtcgggcggacaaaagcagcgggtcggtattgcccgggcgctggccaccaacccgtcggtccttctatgcgatgaagccacctcggcgctcgacccccacactacggtgcagatcttactgcttttgcaggagattaatcgtcggtatggcatcaccatcgtactgatcacccatgagatgtcggtgatccagaaaatctgtcacaaggtggcggtgatgcaggcgggccgtatcgttgaacagggggcggtttttgatctctttgctcagccgcagcatccggtcactgccagtttcgtgcagtcggtggtgcacgaccgcctgccgcagcgggtggcgtcgttcctgcagcgcgataacggcgcccgggctttacgcctcgaatttgtcggcgcgacggcgcagcagccgattattaaccacctgatccgcgagtatgctgtcgaggtgaatatcctgtttgccagcatgtctgaagttcagggccggattctgggatttatgattgtgcagcttctcggcgagcctgacgaaaccgaacgcgccatcacccatctggtcgatgcaggagtgaaaatcacccatgtttgatcttattgataccgccatcaccggcgatcagtttctgctggcgctgcatgacacgctgattatggtcgccgtctcgctgggctttggcgcgctgatcggcgtcccgctggggattgtgctggtggtttgccgtcccggcggcatcgtggccaacccggtggtgcatcaggcgctgaatccgctgattaacgtgctgcgctcgctgccgtttatcattttgctgattgtgatcctgccctttaccagactgctggtgggcaccactatcggcaccgcgggagccatcgtgccgctgatcgtctttgtcgccccctatattgcccgactagtggagagctcgttgctggaggtggatgaggggatcctcgaggccgcggacgccatgggcgcaacccccctgcagactgtctggcactttatgctgccggaggcggcggcatcgctgattctggcccttaccacggcgaccatcggcctgcttggtgcgaccgccatggcaggaacggtgggcggcggcggaattggcgacctggcgatcacctacggctatcagcgtttcgacgcctttgccaccctcaccaccgccctggtgctgattgttattgtccagcttattcagacgctggggacccgcctggctcgccggctgcgtcgcgattaatcgctctaccgcgccggggttgacccggctagcgtgcgcagaccgcggcgaaggcgctggctacccgcgcaatattgccgtggttgagcccggccacgcagacccgaccgctggcgatcagatagatgccatgctcttgacgcagaacgtctacctgatcggcgctaaagccggtgtaactgaacatgccgcgctgggtcagcagataggaaaaatcccccgccggcagggctgcctgcagggccttcaccagcgcgacgcgcatggcgctgatgcgggtgcgcatggcctccacttcttcctgccacagggcattcagctcgggatcgttgagcacctgcgacaccacctgggcgccaaaccccggcgggctggagtagttgcgccgcacggtggctttcagctggcccagcacgcgcccggcgatatcggcattgtcacagaccactgacaggccgccaacccgctcgccatacagcgaaaatatcttggaaaacgagttgctgaccagcgccgtcagcccggcgctggcgatggcgcgaatggcataggcatcctcgtccagtccgcggccgaagccctggtaggcgatatcaaggaatgggatcagctccctgccgatcagcacctcaatcacgcgatcccactgctcgcgggtgagatcggcccccgtcgggttatggcagcaagggtgaagcagcacaatgctgcgcggcggcagctgctggagggcggcgagcatagcggggaaattcaccccgcgggtggcgctgtcgaaccagggataggtatgtacctcaaagccggcgccggcaaagatggcaacgtggttctcccaggttggatcgctgacccagaccgcggagtcggggaagtagcgcttgaggaaatcagcgcccacctttagcgcgccggagccccccagtgtctggatggtggcgatgcgtccggcacgcaacgccggatgattgtcgccaaactgcagggtctggaccgcgcggcgatagggcgccagcccctccatcggcagataaaggctggccttttgctgctgactctgcagccggtcagcggcctgacggaccgcctccagctggggaataatggcctgctcgttatagtacagcccgatgctgaggttaactttgtctgcccggggatcctgttgaaaggcttccatcagcgacaggataggatcgcccgcataggcgtcaacgttctgaaacacagtggttactcctgaaatgaccgtcaaaggtgaagccattacaccgcgtagcgtccgggacggtggttcatggcgataatcgaattcaaaatcacggcgccgaggatagagaccagcagcatcggcaagctcactacccacagcgaggcggtgacgatgcaggcgtcaaccaccatctggaatttaccggcgcggatgccgcttttgtcctgcagatagagggccagaatattaacgccgccgaggctcgctttatggcgaaacagcaccacaaagccgatgccgaccatgatgttgccgaagagggtggcgtaatagggattcaggcgatcgacatggataaagtaaccgtgcaggtcagagaacagggacaccagtccgaccgcgcagaaggttttcagcgtgaaggcggcgcccatccgccggacagagagccagtagaatggcaggttaatgacgaagaagaccacgccaaacggcaggtgggtggcatagtggatcagaaaggccatacctgccgttccgccggtcagggcaccggcctggcgaaataaaataatgccaaaggagatcatcagcgtgccgaacagcagcgccagggtatcctccagccaggtgtgggtcagtttttcaggggaaaggatattatccataaataagcactatcttttcgttaacaaggataagctcttgtttgcaaaaatcgcaccagaggagcgtgccctggcgagcgtttgcggaaaaaatacccgtggtttagcctaacctgttgttctgacaggaagagaaaattgcacggggcgtgcgttttatggtttccgaatgcgtgaattgtgcgaacttgccgcttgtcgcgcattgtctggccccgcgtctgcaccagcgcagggcactgtgccccggttcagcgcagcggggtcgtgcccggcatcagctggccgttctctttaaggcggttgagcacgacggcggttttcagatgggccacccctttgttttgcgccagaatatggctgatcaaatggctcagaccgggcaggtccgggaccgttacccgcagcagataatcggcgtcgccggtggttttccaggcgtccagaatggcgtccacttcactgagcatctgatgaaagctctccacgcattgcggggtgtgattcagcagacgcacctcaatcaggccaagcatctcctgcccggctgcatccggcgccagacgcgcatggtagccgaggataagctgtgcctgttcaagggcgatacggcggcgcgaacactgggaagcggacaggccgataagctcgctcagctcctgattggttaaacggccattggcctgcagcagggtaagtattttcagatcatagtcgtcgatgttgtacatagtggccactagcggaacgtaaaagtggctaccagcctaacagttttttgcctggcgtgaagcctgagcggacggcggcaaaccggatgcaccaaaacgggtcaggtttatgcatcaatccgctctttttctcatgatctgtgcgttatctggccagttttcgcgtgtgatgcgccaggtcggcgccgacatgaccagctaccggaactgatttgaaaagaatatttgaatatatttcaattaattaatttttgtctgacgctgcaagacgctccgctggcctgaaagttgctaccggcgaacgtgactttttacagacaggggcaggtcagagatgacaacgcagcaagagcatcagttaaaacgcgggttaaaaaaccgccacatccagttgatcgccctcgggggggcggtcggcaccggactgtttttaggtatcgcgcaaacgatccgtatggcaggcccgtcggtcctgctggggtacgccatcgccggggttatcgctttctttatcatgcgtcagcttggcgaaatggtggtagaggagccggtggcggggtcgttcagccatttcgccaaccgctactgggggcccttcgccgggtttatgtccggctggaattactgggtgttgtacgtgctggtaagcatggcggagctgacggcggtggggatctatattcagtactggtggccggaggtacccacctggctgtcggcggcgatcttcttcgtggcgatcaacgccatcaacctgacgcacgtcaaagtgtatggcgagctggagttttggttctcgattgtcaaagtggccgccatcatcagcatgatcgcctttggctgctatctgttatttagcggtcacggcggcccggcggcgacggtggccaacctgtggcaggacgggggatttttccctaacggcatcacgggcttggtgatggccatggcggtgatcatgttctccttcggcgggcttgagctggtggggatcaccgcggcggaagccgacgaaccgcataaaaccattcccaaagccaccaaccaggtgatctaccgtattctgctgttttacgtggggtcgctggtggtcctgctgtcactctacccgtggcggaacgtcgtggaagggggaagcccctttgtgctgatctttcacgccattgacagcaatattgtggccaacgccctcaatctggtggtgctcaccgccgcgctgtcggtctacaacagctgcgtctactgcaacagccggatgctgttcggcctggctcagcagggcaacgccccgcgtgcgctgctgcgggtgaaccaccgcgggatcccattgaccgccctggcggtatccgccgtcgccacggcgctttgcgtggtgattaactatgtgatgcccgggaaagcctttgccctgctgatggccctggtggtggccgccctggtcatcaactgggcgatgatctgcatcactcatcttaagttccgccgcgccatgcagcgggcggggaaggtaacggctttccagagtttcgcctatcccctgacaaactggctgtgtctgctgtttctcgccgcgatcctcggggtgatgtatctgacccccgacatccgcatctccgtctgcctgatcccggtatggctgctgatccttgctgcaggctatctgctgcgcaggaaaagcgcgccggcgccggtggcggcgcttgaggagcgttaatctgcgacgccctgcctggcggcagggcgatattattgcgctgaaaatatatagcgccaatatataggatggtttatataattacgataaatgataactaacaatatcacgctgaatataaattagaatgtgaggagaccgcgcgctttttattgatcttgcgtaccgctttgctactatccagccggcattgagactgtatttaataatgcctggaaatggaatagtaaaaaccataatggagtagggtatgaagcatgtgcacaagctggcctggataggcctgttcgtcaatattattatctgttttgtcgcgcgaaatttattacttgatgaaggacagctgaacttccatagtcgggcggacggcgtatggtcctggctggtgctggccctgtttattgccgtggtggttcaggcgatcagcataatgctgtcaggccgctacccttatctggccatcgtcctggcgtttgttggcggcatcgtgatggtgcccgccagcgtgatctttctggtgggtagtctgttcagcttgcaaacgcggattaacgccggatttacgccctggcgatcaaccacggcagtgggcgaggctgataaccagcagctattaacctttaatgcctcaggcttttatccccaaggggcgctggcgctcatcgccgggatcattattttaatgattggcatgggtataggcggagtatttattgccgctggtattgttgcgctgtgcaatggctatcgtctgcaaaatcgggtggtgattggcgtgagcggcgagtcgatgatatttacgccggggctctatgccgatacctacgttattcccttgcgggatgttgccgtagttgaacgcagcaataatgatgcgaaagttcggctgctgatccgttccagcggcagaagcttcacgttgcgtaaaaaactgctcgccggcgataaggttaatgacgccttcgccgccattctggcaaaactgactaccgtttaacgctggcagaatagagaagccgccaggcggcgcgaggcgtcctggcggtgaaaggtgggttagcctgcgcggctaccgcaccagcttgtctcttacgaacagcactgcctgttaatccacgttagtaaaataatcgcgcgcggcggtctcgacgcgtttcgcatccagcccggtattctcagtgatctgttcgataaacgatttaaatttttcgctcatcacgttacccccttcccagtgggcgacgtaaaatttgcactgatagcgataaaaatggagagtggtatctcctaacgtgtaatacatgcgcttctcctgtcctgtagtacggttgccgcgtccacagcgtcagcaacctttttctcattacgatcgatctgcattctatcctcctcccaattggctgaaatttccagcggtgctttgcgccatgtagcaggataaagcaatgttaatctgcggatagatagtgattttttctaatgtggagcaaaagtagcggttacctgcgggccgcgcaggtaaccggagaagagggcggattagcgcagcgtgttgcgctcgtcgtcggacaggtccagggtctgcaccataccactttcagcagagcgcaccgccgcttccagaacggccatcaccgccagcgcttccaccggcggcaccggattggcgatctggcccttcagcgcatcgcggatcagcatatagtactggcgctgatcgccctgcggggtagcctgcgcgtgggcctgcagcgaggcatcatagataaccagcgggtcgtcatcctggccccagccggcgctgcccggtaccacgcccgccagcagctggctctcctgttggtcggcccgcgctttgataacgctacctttatcgccgtgcacggtgaagcgcgacgagccgcccgcgaccagcatgctgcagtgcaggatcactttatgcgccgggtagtttaataccacatgcgcccagtcgttgatctccgcgccgtcgcgcagggtggctatgttaccttgcaccgactgcggcaaaccaaatagctgcagcgcctggtcgataaggtgcggccccaggtcgaaccacaagccgctgcccgggacgttctgctcgcgccagcggacgcggacttccgggcggaagcggtcgaaatgcgactcgaagtgtttcaccgcgccgagggtgccttgctcaatcatctgacggatcccgagatagtcgctgtcccagcggcggttatggaagacggagagcagacgctgtttctcctccgccagggcgatcagctcccgggcctcctgcatatcgagggtaaagggcttatccaccaccacatgtttgccggcgttcagcgccaggcgggccagcggggcgtgcgtggcgttaggggaggcgatgaccaccaggtcaacgtccggatgctggaccgctgcttccggggaggcgatcaccgtgacgtccggcagatcgcgtttgaccttctcttcatcgcgggaagcgacgaacgccaggttcagccccggcaccgaacggataagcggcgcgtggaaggtcttaccgacgaatccgtagccaatcagggcgatatttatcgtattgttactcatcaggttctccacgttgttaagcgtcagcaatatgtacagagagggcggggtcatcccccagctcagcccagggacgatcaagaaaaagatggtgaatgtcgctgagcccggccacccgccacggttcgcagcggttgagtttggtacggtccgccaccagccagtgctcggcgctggcggccagcatggcgcgtttaacgtcggcatcagcttcctggctggcgctcagccccagcccggtatggagcgcgcaggcgccgagaatggcgatatcggcccggtagcgggtgaccagcgacagggtggcgctgccggcgaacagccgttgtttactatcccactggccgccaagcaggatcagctggatatcggcacggtcgctgaacagctgagcgatatccagagatgccgtgatcacggtcaacggccctttcagctgggctgccaccgccaacagcgtgcttccggcgtcgagaaacagcgtcgagccagagggaatgcgcgcggcgacctgctgacccaggcgctgcttggtctgggtgagaagagcgtttctgccctggcgcgtcatggccgggacgttaagggcgatggccccgccgtggcttttctgcagcacgccctgttgttccaggtcgctcagatcgcggcgaatggtatcggccgacacctgcagctctgcaaccagctcgctgatgctcagctgaccggtttcgctaagcctgtcgagaatatgtttttgcctggcgagcttatgcatggccattgactccgcaaattaacgcaataaacagcataatacagcaagaagttgcaaaataaacggcaaaacgtcgctctgtatgtgttgaatcgtgaagaacttgatttcactaagttttaacgttaaatgaggggagcgccgcgaccgggggcgaaagcgcttttcaatgaagcgactaggcctgtatttccgggtcattaaaagcaagaatgcgcgctttcgcgtaccttatagagaaggcgcgtaatttagcagatatggattaacggaggttgagtggacgcgattaaaggctcggagttgcagataccggacgcgatcttcgcgtgggtgctcgacgggcaggggggcgttaagccgctcgccgatgacgatattatcgacaaagacaagccttgctggctgcatctcaactatacccatagcgacagcgccgactggctggcggccaccccgttgctgcccaataacgtacgcgatgccctggcgggagagagcacccggccgcgggtgacgcggatcggtgacggggcgctgatcaccctgcgctgtatcaatggcagtaccgatgagcggcccgaccagctggtggcgatgcgcctgtatatggatgagcggctgatcgtctccactcgtcagcgcaaagtgctggcgctggacgatgtgctgggcgacctgaaggaaggtaatggcccgacggacggcggcagctggctggtggaggtctgcgatgcgttgaccgatcatgccagcgagtttatcgaacaactgcacgatcgcattatcgacctggaagacgacctgctcgatcagcaggtgccgccgcgcggatttctcgcgctgctgcgtaagcagctgattgtgatgcgccgctatatggcgccgcagcgcgacgtttatgcccggctggccagcgagcggctgccgtggatgagtgacgatcagcggcggcgaatgcaggatatcgccgagcggctggggcgcggtctggatgagatcgacagctgtatcgcgcggacggcgatcatgagcgacgagatcgcccagattatgcaggagtcgctggcgcggcggacctataccatgtcattgatggcgatggtgtttctacccagcacctttttaaccggcctgttcggcgtcaacctcggcgggatccctggcaacagctggcatctggggtttagccttttctgcttgatgttagtcgttgtcatcggtggtgttgcgtggtggttacatcgcagtaaatggctgtaaagaatcgccttttagcggctgtagtgccgggaaaacccggcaatgtttgagcgaaatcaataaaccatctacccattcagggcaatatctctctcgcaggtgaatgcaacgtcaagcgatgggcgttgcgctccatattgtcttacttccttttttgaattactgcatagcacaattgattcgtacgacgccggctttgttgagtcggctttttttttgcgctctccggaccagcttctacccttactaagacacccgacggtttctggccgttgacgcctgcgggttcgcccgtatcactctccgggaggcctctatgtattacgcttcagagctgacagcccagtctatccctatctcgcccgagccgaacgatccggctcctttacccgatccacgaccgcgtccgcagccccagcccgatccgccgcctgacgaagagccgattaaattgtcgcatcaggcgcggagatctgcgaggatacgcgcctgcagattgtctgccttttaatacgagaatacattgtgaccgctttttctaccctgactgttttacctgccgcccaattagccaaccttaacgagctgggttatctgtcgatgaccccggttcaggccgccgccctgccggcgatcctcgcggggaaagatgtgcgcgtgcaggcaaaaaccggcagcggaaaaacggccgcatttgggctgggtctgctgcagcatatcgatccggcgcgcttcgagacccagtcgctggtgttgtgcccgacccgcgagctggccgatcaggtcgccggcgagctgcgccgcctggcgcgctgcctgccgaacatcaagattctgatgctctgcggcgggcagccctttggcgcccagcgagattccctgcagcatgccccgcatattatcgtcgccaccccgggccgtctgctcgatcatctgcagaagggaacggtctcccttgacgcgctgcagaccctggtgatggacgaagcggaccgcatgctcgatatgggcttcagcgacgccattgatgaggtgatccgcttcgcaccggctgaccggcagacgctgctgttttctgctacctggccggcggcaatcgcggcgatcagcggccgggtgcagcgtaatccgcagaccattgagatcgacactgtcgacgcgctcccggcgattgaacagcagttctttgaagtttcccgccacggtaagattgccctgctgcagcgcctgctcagccagcatcagcccgcatcctgcgtggtgttctgcaataccaaacgcgattgccaggcggtctgcgatgcgctcaacgccgccgggcagagcgccttgtcgctgcatggtgaccttgagcagcgcgatcgcgatcagacgctggtgcgcttcgctaacggcagcgtccgggttctggtggcgaccgacgtcgctgcccgcggtctggacatcaaatccctggcgctggtggtgaatttcgagctggcctgggatccggaggtgcatgttcaccgcatcggccgtaccgcccgcgccggtgaacaagggctggccatcagcttctgtgcgccggaagaggcgcagcgcgccactattctggccgacatgctgcagctttccctgaactggctgccggcgccgacgggcaacaccatcgcgccgctgacggcggagatggcgacgctgtgtatcgacggcgggaaaaaggcgaaaatgcgcccgggagatgtgctgggagccctgaccggggatatgggctttgatggtgccgatatcggcaaaattaccgtccacccggcccacgtctatgtggcgatccgccagaatatggcgcagaaggcgtataagcagttacaaaatggcaagatcaaaggtaaatcctgccgcgtacgactgctgaagtaagggcaggagagtgcgtctcaggcggctgcctgagacgcgtgagggttatttcacttccactacgttcagacgcagctcatcgagacgggcgtcttcttcttccggctgccagccggcgggctgcaggggaatatcttcccggtcaaacgccagatcgccaccatccaccacctctgagccgtgggtgatacctttaaaatcaaacagattgacgtcgctcaggtgcgaaggtaccacgttctgcatcgcgctgaacatggtttcaatgcgcccaggataacgcttatcccagtcgcggagcatatcggcgatcacctggcgctgcaggtttggctgcgaaccgcacaggttgcacggaataatcgggaagcctttggcctgggagaagcgctcgatgtccttttcgcggcagtaggccagcgggcggatgacgatgtgtttgccgtcgtcgctcatcagcttcggcggcatccctttcattttgccgccgtagaacatattcaaaaacagcgtctgcaggatatcgtcgcgatgatggccgagggcgatcttggtcgccccgagctcggtggcggtacgatagaggatgccgcgacgcaggcgagagcacagcgagcaggtggtttttccttccgggatcttctctttgacgatgccgtaggtgttctcttcgacaatcttgtattcaacccccagctgctccagatacgccggcagaatatgctccgggaaccctggctgcttctgatcgaggttcaccgccaccagcgagaaggagatgggcgcgcttttctgcagattgcgcaggatctccagcatggtatagctgtccttgccgcctgaaagacaaaccataatgcggtcgccctcttcaatcatattgaagtcggcaatcgcctcaccgacgttgcggcgcagacgtttctgcagcttatcgatgttgtacttttcttttttactgatttcttggttttgcagcatgtaatagtggctcaattcatagtgtggcatcagaagagcacgcattctgccagccgctgaacaacgtggcgctggcgcgtagcaattattgaggtttgacaggcaaccgtggcgtgtatggtacggattcaggggcggaatgtcagcatctttccggcactttcggcagcgagcagccaggcgggggcggctgatgcggaaataaaaagcccgccgggcggcgggctgcggcgttagcggaccaccagtaccgagcactcggcgtgacgaaccaccgcggcggcgttggagcccagcagataagttgtgatatccggtcggtgcgaagcgatgatcaccaggtcggctggcagcgacttggccagcgcaaggattttatcttttggcgatccttccgcgacgtgaaaatgcatccggtcttccgggatggagaactgcttcgcgatctctttcaattgcgtttcagaaccctcacgcagctcgtccatgccgggaagctcagcggtataggccattcccagtgaggcataatagggcagagaagggatcacggtgaggaaatgcacctcggcgtcgtcaatccgcgcttccgattcaacgtgactgataatgcgttcagtaaattctttatcagagatatcgatagggacaagaatcattctgctcataaaacctcctgtttaagtatcccttcatattgtacggtattagggcacgttttgtatcatgaccgcagtcacactttgacattaacgtagcttgcgttcgggaaattttcctttgatcaccccgtcataataccggccttttgacaccacctgtaaaaaatcatgaaaaatacgcggtgggaccccggtatattgtaatggcggctggtgatagaaatagatttccagtgtggcggaggcgtcatcgtaggcgacggagataattcgggaagattttaccggatggtggtgcatgatggacgtcctcgggcaagcactgactggccatgactatatcattaaacggacggctattttagtccgcgagatatagcgttttgttttatctgcagcgaggcgggagggggaaagcccgccggaaccggcgggcaggcgcatcagaactggtaaaccaggcccagggcgacgatgttatcggtagagataccgttgtcttcgtagaatttgtcgttaccatccagcaggttgattttgtaatcaacataggtggacatattacggttgaagtaataggtcgcgccaacgtccatatatttgaccagatctttatcggcatagcggccgttattgtacagatctttgcctttggactgcaggtaggagatggccggacgcaggccgaagtcgaactgatactgcgcggtgacttcgaagttttgcgttttattggcgataccgccaccgttggtactgctggtagagccgtatggcgtcatattgcgggtttcagagtacatggtcgccaggtaaatatcgttggcgtcgtacttcaggccggcggtccaggcgtccgctttgtcgcctttggcgtatcgttcggtgtgagtatagtgttgctggtcgcctgtacggtcagacgaggtgtaagctgccgccgcgctgatacccatgccgaagtcgtaggaagtggagaggccgaaaccatcgccattgtcgaagcgaacatcgctgtcgctgctgcggttattggtgccgacgttgatatcctgcgcgttctggccttcgtttttaccctgatactgcagggcgaagttcagaccctccaccagaccgaagaaatcgctgttgcggtaggttgcgacgccgttggcgcggcctgccataaagttatccgcataggtgtaggagtcgccgccgaactccggcagcatatcggtccagccttcaacgtcgtacagcacgccgtagttacgaccgtagtcgaaggagccgtaatcgcccactttgataccggcgaatgccagacgggtccacgcctgatcgctggaggtctcggtgttgttggcctgaacgttatattcccactggccatagccggtaagcatatcgttgatctgggtttcgcctttaaagccaaaacgtaaataagtttgatcgccgtcttttttcgagtcgctggagaaataatgcagaccatctaccttgccatagagatctaatttattcccgtctttattataaatttccgccgcatgcgcggcaccggcggctaataaagccggaataacgagggccagtacttttcttttcatgaagaaattcctttaactgtttttatgttttaacttccgggtgggaagtgaactcatgctaaaggagcggtctgagatccggtaagactcaattgttacgatataagtaaaatctaaaataaataataccaatgaaatggtgataattatgctgaatgcatttatagataatatacaaaataaaaattatacatgcccgggctaatcacgtattatttgcgcgttatatgcctttattgtcatgccaataatttattgttgccgtctcattctgcggaatgatgttgtttatcggtaaaacgacaagcccgaacgttgtgttcgggctttttttatggacaaaggtgacggggcggttaaccttcgcttggcgatttctccgctttgccagccagctgggcgaggaagtcatagcgcttctgcagatcggcggcggcgtctttccatagctgctccgccacttcaggctgctgggcgttcaggcggcggaaacgttgctcattaagcagcgtctcggccagcgcgtctgatggcggacgggaatctagcgccagggggatcttgccttcatctgctcgacgcgggtcgaagcggtagagcggccagaagccggtggcggtcagctgacgcatctggtcgtggctgagcgccagatcgtagccatgctcttcgcaagggctataggcgatgatcagcgatggccccggataggcttccgcttcctgaatcgcttttaccgtctggttcagctgcgcgcccagcgaaatttgcgccacataaacatgaccgtacatcatcatgctgacgcccagatctttacgcgccttgcgtttgccatgctcgccaaacttagtcactgctcccagcggggtggcttttgacgcctgcccgccggtgttggagtaacactgagtgtccagcaccagaatattgacgttttccgtcaggctcagtacatggtccaggccgccgaagccgatatcgtaagcccagccgtcgccgccgatcagccagacggatttctccaccagtgcgtcggcatcggtcagcagctcttcagcacccgccacgccggccagcgcctgacgcagggccgccacctgttcacggcgatcttccggcgtcgcctcggcgtgcagcgccgcgttcagctctgccggcagtttatcggcgaattcgctcagcaggcgcatcacgcgctggcgatgctggtcgacggtcaagcggaagccgagcccgaattcggcgttatcctcaaacagcgagttggcccacgccgggccgcggccgttggcgtcggtagtgtacggtgtcgagggcaggttgccgccgtaaatggaggagcagccggtggcattggcaatcagcattcggtcgccgtacagctgggtcagcagtttgatatacggcgtttcgccacagcccgagcaggcgccggagtattcaaacagcgggctaatcagctgcgaggtgcgaatatcaatgcgctccagtttgctgcggtcgatttccggcaggttgaggaagtactcgtaattgaccttctcctcttccacatgctccaggcgggacatcatattgatggccttgatctccggggtctggcggtcttttgccgggcacacttcgacgcacaggttgcagccggtgcagtcttccggggcgacctgcagaacgtatttctgcccgcgcatatcgcgggatttcacatccagcgaatgcaggctggcaggggcgttctccatctcttccggggcgaccactttggcgcggatcgccgagtgcgggcaggcggcgacgcagtggttgcactgagtacacagcgcttccttccagatggggatctcttcggcgatgttgcgtttctcccagcgggtggtgcccatgggccaggtgccgtccggcggcagggcagagaccggcagcgcatcgccgagcccggccagcatcgcggcggtgaccgttttgacgaaatccggcgcggcgtcggagaccaccggcgggcggttcggactgctggcgttcaccggctggagcggtacttccgccagtgattcacgggccagggccagcgcctgccagttgcgctccaccagctcctgacctttactgctgtagcttttggcgatggctgcctgcagttccgccagcgcgctatcacccggcaggatctgggttaaatggaaaaaggccatctgcatcacggtattaatgcgcgccccgaggctgcattcgcgggcgatctttgccgcgttgaccacgtaaaaacgcgcttttttctgattcagggtggcctggacttcctggggcaggcgggaccagacctcatcggcgctgtacggcgtgttgagcaggaaaatgccgccgggcttcagccgctcggccatctggtatttatcgataaactgcagctggtggcagccgacgaaatcagcctgcgaaatcagatacgatgaacgaatcggtttttcgctgacccgcagatgcgagacggtgaggccgcccgctttcttcgagtcatagacaaaatagccctgggagaaccacggggtcgagttgccgatgattttgatgttgtttttggtggctgacacgctgccatcgctgccgaggccgtagaacagggcctcgagcttggcctctgccggcagggtattttcgcccagcggcagcgacaggttggtcacgtcatcatagatcccgacggtaaagcgcggcttcggctgggcggcctgcagttcactgaatatcgccagcacgcattccggaccaaactccttggaggagagaccgtagcggccgccgatagtgcgcggtagcgtctcgcgctcgccgcggttaaaggcttccgccagggcggtcatcacgtcgaggtaaagcggttcggcaagcgcgccgggttctttggtgcgatccagtacggcaaccgcgcgggcgctctccggcagtgccgccagcaggtgggcggcggagaacgggcgatagaggcggacttttagcacgccgactttctcgccgcgactcagcaactcatcgaccacctcttcacaggtgccgatggccgagcccataatgacgatcacgcgctctgcctgcgggtggccgcaaaactcaaacggtttgtactgacggccggtggcggcagcgaagtcgtccatcgctttctcgacatggtcatacaccgcgtcgtaccacggattggtagcttcccgggactggaagtaagtgtcggggttggccgaggttccgcggatcaccgggtgttccgggttgagcgcgcgctggcgatgctcagcgatcttatcctgcggcagcagggcgcgaatagtgtcatccgccagcggggcgattttgttgatttcgtgcgaagtacggaaaccatcaaagaaatgaataaacggcacccggctttgcagggtggcgatatgcgagattagcgcgaaatcctgcgcttcctgaacgctgctggcgcacagcatggcgcacccggtctggcggacggccatgacatcggaatggtcgccgaagatagacaacgcatgggtagcgacagtgcgggcggcgacgtgcagcacaaacggcatcagctggccggccagtttgtacagcgtggggatcatcagcagcaggccctgcgatgaggtaaaggaggtggagagggcgccggtttgcagcgcgccatgtacggcgccaatggcgcccgcctccgactgcatttcgaccacgcggggaacatcgccccagacgtttttcagcccattgccggcccaggcgtcagcctgttccgccatcgttgaactgggcgtgatcgggtagatggcgataacttcactggtgcgaaacgcgacggaagcgaccgcgccattaccatcaatcgtaatcatatgaagacacccttacattgcgcaaaagaatggacgcgtgaaaccgcgacgcgccctgtaattatataaggggtagtttagcaaaccgctgaccccgccatttttgcatttgtgtcctcaatgcgccgggtacccgtgaccagatcaatattttgcgtggttcgcggagaaaatggctgcctgccgggagaggaaccacctgcgccgggcgacatggccgaggcagatcaagctttaggcgaaaatttgctagaaaatgttaatgaggcgcataaatacgtacttcccctctcgacgccgcccgccacgctgcctattattctggggtttgcttttttaagacgtttccgaggggagagagaatgcgagctgcgatgttagtaggatgtgcggcgctgttgctgtccgcgtgcagtagtgaacccgttcagcaggccacggcggcgcacgtcacgccgggaatgcgggcggcgatgagcgacgccggtcaggccaactgcgccatgataggcggctcgttatcggtggctcgtcagctcgatggttcggcgattggcatgtgcgcgctgccgaacggcaaacgctgcagcgagcaggcgctggcgggcggcagctgcggctactaacagcggccccgtcgcggggcagcgtcagcggcacctcaacgccggctagtgcatcaggtcggcgagcttatagaccagcgtctggtcggcggtcgccagcgtcaactggttttccgtcagatcgacctgcgcaccctcgcgcagcatcttgtcgatcgtcgcatccagggtattgagctgggcatcgtggcacagcatccgggtcatcgccagcgatttgaccttcagctcgccgtccgacactttaccttccccgctaaagccgttgcacatattgccggatacatacatcttgcccgtaatagccatcttctcaccgaagcttagctccagcggccggtcgctggcgttgaccgcctggccgttgacgctggtcagcacgaagcgatgatgctgcagctgttccgcaccggtggacaccttactgttatagacacagccggacagcagcatacctgccgccagaagcgccgcaaatttgttcattttcactccaaaacattcacataactaataaaaccaagccagtgtaacggtatcgcagcagggatctgtggggattatctgaatgtgctccccccggaagaggagcacaaaagggaaaggcgtcagacgatggcgtttggacaggtttcgccgttggcgacctgctgcaggttacccagagtggtctccgaaatgctgatcagcgcctcggcggtgaggaacgcctggtggccggtaaacagcacgttatggcaggcggagaggcggcggaagacatcgtcctggatcacgtcgttggatttgtcttcaaagaacagatcgcgttcgttctcataaacgtccagccccagcgcgccaattttctggtgcttcagggcgtcgatggccgcctgagagtcgatcagggcgccgcggctggtgttgatcaccatcaccccgtctttcatctgatcgaaggcttcgcgattgagaaggtggtagttttcgtcggtcagcggacagtgcagggagatcacgtccgattccttgtacagcgtggcgaggtcaacatattctacccccagctccagcgcggcggcgcttgggtacgggtcgaacgccagcaggcgcatgccgaagcctttaaggatccgcaacatcgctacgccaattttcccggtgccgatcaccccggcggttttgccgtacatggtgaagccggtgaggccttcgagggagaaattggcatcgcgggtacgctggtaagcgcggtggatgcggcggttgagcgacatcatcataccgatcgcatgctcagcgaccgcttccggagagtaagctggaacgcgcacgacgcgcaggccaagctcctttgccgcctcaaggtcgacgttgttaaacccggcgcagcgcagggcgatatatttcaccccgtgggccttcagctcttccagcaccgggcggctgccgtcgtcattgacgaagatacataccgcttcgcaaccgttggcggttttggcagtcttcgctgtcagcaggaaatcgaagaattccagttcaaagccgtatgcatcattaacgtgctgcaggtactttttatcgtactgcttcgtactataaaccgcgattttcataagacttttctccagtgattataccgtcacggtagcatatttaaaataaacgtacaattattaaaaaatagtttaatgagagggtgctaatcctaattctagagcatatcgcggacttgcggaatctctttgaaagacaaagttttttcaccacaaactgaggctgaaagcgccgggggcgagcagcagaagcggccacagcagaccggagctgacgttagccagctgaaacgaccacagcggcagactgctggcgccgctaacgaagggcagcgtagccctcaggggagagagaaagcggctgaaaaagatagcccacgggccatagcgctgaaagaagaggcggctgcgggccagacgctcggcggtcagccagcgtagatgggtgaggcgatgacggtagcgaatgcccagccgccacgatagccagaatccgccgatggcgccgaggctggcgctggaccacattaacaggaaatgtccgaggctggcggaagcgaatgtccccagcagcagcaggccggaggtgccggggattgccagcgagaccaatgcgcaggatttagtgaaggtaagcagaaaaacaatcagcaatacccatggatagtggtcctgtgcgctctctatgagcgagataattaacgacaccgcctctcccgcaagctattcccgtctggctggagtgtggcaggggcgacttaaacaacagttaaatgataatggccgaacgtcgcgccgcgagtccggctggcaactatgctttaacaggccgtaaactttcactcactggtcgaacgtgtcacaatggacgcctttcggcttttacttatgttgaatcaggatattaactgcccatgaagggtaaatataaagccgccatcgcgctggtgttagttctggtgttattgccgctaaccctgctgttgacgctaacccactgggtgccgacgctggcgggcatctggctgcccgtgggcacgcgtatctctttgcaggagagcccgcgcctgacgcggtcggccctgctgatccccgatctgcgttatctggtgggcgactgtgaaatcgcccgggtgaccgatgcccgtctctcgcgtcccagccgctggcggctgcatattggccagctggagatcaacagcgcctgcctgagcaaactgccggccagcgatccctctcccggttcaccgcgcacgcttgccgaatggcaatcgatgttgccctatagctggttaaccattgacaatctgcggctgtcgccgtgggagaaatggcaggggcggctggtaatgtcattaacgcctgcgcagcaggatatcggctttgccgggaaggaactgagtctgcaggcgcgcctgcgcggccaggcgctcaccgtcagccagttcagcgcccggctgactgacgatcagccgccggtgaagctggtggggaccttccatctgccgctggtgccggatggtctgccggtcgacggccagatgcagggcaccttcgaattcccgcagactgcggaatggatcgatgctgagctcgagtggcagcacaatcgcggccagctgctggtcaccccgcggggtgaggtagagcctattctggacctgccgtgggagatcaccccggagcggatcaccatcagcgacggccgttggcgcacccgttacgaggcgtatccgctgcgcgggcgggtggcgctgtcggtgggtaactggcagcagggcaccgaacagatgatcgtcagcggtcgcctgaatgttctcaccgaggggcatgccgggaagggcaatgcggtactgaatattggtccgggcaagctgagcatggataacagcgatctgccgctgcggctcaccggtgaggccaagctgggggagatgatactatacgcggcgctgccggctcagctcagcgggccgctgatcagcccgcagctggcttttcaccccggtgcgttgctgcgctcgcgcgggcgggtgatcgacgcgctgaatattgacgaaatccgctggccgctggccggggttaaggtcactcagcagggcgtcgatggccgcctgcaggcgatccttcgcgcccatgagcagcagatgggcgactttacgctgcatctggacggtcaggcgagcgattttctgcccgacagcggccgctggcagtggcgctactggggcgagggacattttaccccgatgcaggcgcgctgggatgtgaagggcagcggggagtggcgcgacaatgctattaccctgagcagcctttccaccggcttcgataagcttgagtacggcacaatgcgggtcagcaccccgcgtctgaccctcgagcagccgatccgctggctgcgcgatgctgagcatccgcggttgaccggcgcgctgtcgctggacgccgccaaaaccaccttctccggcggcagctatctcccggcctcaacgctgaaattcgctctcgacggtcgggacccgacgtggttccagttcaccggcgccctgcatgccgaggctatcggtccggtgcgtctgtccgggcgctgggatggcgaacggctgcgcggccaggcgtggtggccaaaacagtcgctaacggtgttccagccgctggtgccgccggactggaagatgaacctgcgcgaaggcagtctctacgcgcaggtggccttctcggcggcagctgggcagggatttgaggcgggcggccatggcgtcctgaagggcggcagcgcctggatgccggataaccagatcaacggcgtcgacttcgtcctgccgttccgcttcagcgacggtcactggcagctgggcacccgccgcccggtctccctgcgcattggcgaaatcgtcaaccaggtcacagcgcgtaatctgacggcggacctgcagggcacctggccgtggagcgaggccaatccgctgcagctcagcgacgtcagcgtcgatctgttaggcgggaaactgacactgctgcagctgcgtatgccgcagcgcgacccggcgttgatccgcctgcagcatatctccagcagcgaactgaccagcgccgtcaaggtgaaacagttcgccatgtccggcgcggtgagcggcgcgctgccgctgtggctggagaataatcaatggatcatccacgacggctggctgcgcaatgacggaccgatgaccctgcggctggataaagacaccgccgatgcgctggtggcggataacgtctccgccggggcggcgattaactggctgcgctatatggaaatctcccgctcgtggacgcagattaacctcgataatctgggcgtgttgacgcttaaggccagcatcaacggcaccagccgggtggaagggaaaagtagtaccgtgcatttaaactacgctcatgaagagaatattttcgacctgtggcgcagtttgcgcttcggcgacaatttacaggcgtggctcgagcagaatgctacgctgcccgtacggcgctgtacggacggtaagacatgtaaggaacctaaatgaagaagctgttactggccatggcggcgtcgatgctgctcgccggctgtacgccgcgcatcgaaatcgcggcgtcgaaagagcccatcaccatcaatatgaatgtcaaaattgagcatgagatccatatcaaggtcgataaggatgtggaaaacctgctcaaatcccgcagcgatttgttctgaggcgacgatgagaaaacgactgttaaccgcggcgctgacgctggctttactcagcgcgcccgcgctggcgttgaccctgagcgaagcgcgccagcagggacgagtgggggagacgctgaacggctatctcgcgccgctgcgtcaggataaagagacgctggcgctggtaaagcagattaacgccgcgcgcagcgaaagctaccagcagctggcggatgacaacaatctgccggtggatgaagtggcgaaaatggccgggcagaagctggtggcccgcgcgcagcccggggagtacgtccagggattgaacggccagtggctgcgcaaataattagcgacagcgcttgcggtattcccccggggtgacgccaaagcgctgcttaaatgcggtggagaaatggctgtggtcgctgaagccccagcggtagccgatccccgccagcttttcatcgtcatgaacattctgtaacgcctgggcacacagatccaaccgccggttcttaatatactgcgccaccaccagcccctgatcggcaaacagccggtacaggctgcgtaccgacatgcccgtctcgctggccagccactccggacgcagatgctccgactgaatggacgcatcgattaacgcaataatcttctgaaactgcttttcccgccgggaaggggcaggatcgcgctgatgcagcaccgggcgcaacaggcaggcgatcgcctccagcgcggcttcgctctcgctggcggagagcgtcgtgccgcccatgctttccagcagcagtcgctggctgagctggaccattggcagagatttgtccagccggcaggcggtagtgatgtcccctgtgggcgccacccgctggcgcggcagcagcagcgaggcctgacgcgaggtctgctgccagacgatggagcatgggcgggcggcgtcgattaacgtgatatcgcctgccgccagcgtcacctggcgatcgtcctgttcgaggatggcttcgccggcgagctgaaacacggtatagaaccaggcgtcgttatcgcgttttatctcattgcgcgtgcggtagagattgacgccggcggcggtgacggtactgaccttgaggctgccggcgtagcgggcgtcaatctcgccgtggaaactctcctccaacggccgggcggcgaaatggccgcagacctgattgatcgtcgccagccagcgctgatacgccagccctccctctgccgtggtcatcattcgcccttctcctctaataacaatgtttccgcattgttgcatttgtgtcgcctcaggcaagggcgcgatggcgggtatatgaaagaactattacccgcggcacatttctgcgagggcagacgacggaattgcggcgactgtcacagcggcgcaaacgaatgtcacagagaaaaaagcgccaaccgccaaccagacatagactgaaagcactatccgcgatgaataaggaaagggtatgtccacctcacagatagcgctgcttgccagcgtccagcagtttttataccgtcagcatggcctgtatatcgacggcgccccctgcgccgcgcagagcgaaaaccggttaaccgtctgggatccggccaccgggcaggcgattgccaccaccgccgacgccagcccggcggatgtcgaccgggcggtgatgtccgcctggcgcgcttttgtcgatcgccgctgggccgggcgcaccccggctgaccgtgaacgcatcctgctgcgttttgccgatctggtggagcagcacggcgaagagctggcgcaactggaaaccctcgagcaggggaaatccattgccatctcccgcgcctttgaggtcggctgcaccctgaactggatgcgctacaccgcggggctgaccaccaagatcagcggccggacgctggacgtttcgatcccgttcccgcaaggggcgcgttaccaggcgtggaccaaaaaagagccggtcggggtggtggcgggcatcgttccgtggaatttcccgctgatgatcggcatgtggaaggtcatgccggccctggcggcgggctgttcgatcgtcatcaaaccctcggaaaccaccccgctgaccctgctgcgggtggcggagctggcgacccaggcgggcattcctgacggggtgttcaacgtggtcaccggcagcggcgccggctgcggcgcggcgctgaccgcccatccgcaggtggcgaaggttagctttaccggctcgacggcgaccgggaaacagattgcccgcgtggctgccgaccgcctgacccgcgtgacgctggagctgggtggcaagaatccggcgattgtgctcaaagacgccgacccccagtgggttattgaggggctgatgaccggaagcttcctcaatcaggggcaggtctgcgccgccagctcgcggatctacatcgaagcgccgctgtttgacaccctggtcagcggcttcgagcaggcggtgaaatcgctgcaggtggggcctgggatgcaggagacggcgcagatcaacccagtggtctcccgggcccactgcgacaaggtggcggcctacctcgaagaggctcgccagcagaaggcagaactcatcagcggcagcgccggaccagatgcgggagggtactatattccgccaacgctggtggtaaaccccgacgccggactgcgtctcagccgtgaggaggtttttggcccggtggtgaacctggtgcgagtggccgatggcgaggaggcgctgcgcctggccaacgacagcgattttggtctgaccgccagcgtctggacccgcgatctgacccaggccctgaactacaccgaccgtctgcaggcgggaacggtatgggtcaacagccataccctgattgacgccaacctgcctttcggcggcatgaagcagtctggtaccggccgcgatttcggccctgactggctcgacggctggtgcgaaaccaaatccgtctgcgtgcgctactagccctccgtcggggaaggcgaaaggctttcccgacgcgccccttgccgacttccggtctttctcgctactgtggagggcaatctttgcctaatctgggcggtgaatcatcaggaggtcttcggcatgacagcatttcctaaggttgcgctaattggtcccggcgccatcggcaccacgattgccgccgccctgtttgagagggggagggcgccgatggtctgcgggcgtaccgcccattcggcgctggtgctgcgcactgacgagggtgagatcgtggtgcccggcccggtgcacaccgacccgatggcgatatccgcccccttcgacctggtctttgtcgcggtgaaaaccacccagacggaggccatcgccccctggctgacggccctgtgttcccctgacaccgtggtgtgcgtgctgcaaaacggcgttgagcagcgccagcagtttgcccccttgaccggcggcgcgacggtgctgccgtcggtggtctggttcccggcgcagcgcgatgccgatgcctctgtctggttgcgcgccacgccgcgcctgacgctgccggatctgccgggggcagagcgagtgcagcaggcgctggcgggaacccgctgcgcggtggacctggcggctgattttaccaccgttgcctggcgcaaactgttgcagaacgcggttgccggactgatggtgctgaccggacgacgcgccgggatgttcgcccgggaggacatcactgccctcggactggcttatctgcgcgaatgcctgcaggtggcgcgggcggaaggggccgccctgagcgacagcgtgccggaggagattatcgccggctttcatcgggcgcctgccgacttaagcacctctattctgatcgatcgcctcaatggccgaccgctggagtgggatattcgtaacggcgtggtgcagcgtcgcgggcgtcagcacggcattccgacgccgctcagcgatatcatcgtgccgctgctggcggcggccagcgatggcccgggctgacccgggctggcgcgggtgcgagccactggaagcgggatctgctatgatcccgactttcgttgtctggagccagtcgatgttcaacgacgccattgtttatgaccgctacgggccgccggccgccgtgctgaccctgaaacgcctgccgctggcgccgctggcgggcggacgggtgcgggtcaggatgcgctttgccccggtgaatccttcggatctgatccccgtgaccggcgcctatcgccaccgcacccgactgccggccgtcgccggctatgaaggccttggcgaggtggtcgccgcgccatacggcagccggttagccgcgggccagcgggtgctgcccctgcgcgggggcggcacctggcagcggtttatcgatctggatgagacctggctggtgccggtgccgccggcagttgacgatctgctggccgcccgcgggtatatcaatccgctgacggcgatgctgatgctcaagcgctggccggttgccggaaaacacctcgtgctgaccgcggcatcgtcctcctgcgccagtctgctggggcagtgggcgctggcgatgggcgcccgctcggtgagcgggattattcgctcgccgcagcatcgggcgcgcctggaacaggccgggatctatccgatcctcgataccgaccgggcgctgatggagaaggtcagccagcacagcgatctggtgtttgacgcggtgggcggcgaactggcgaatacgctgctgtcggtgctgcccgggtcgtcgaccctcatctcctatgggctgttatccgggcggccgctgacccagacgcgcggtagcgcgacggtgcgcaagtttcatctgcgggaggcgctgccgacactcagcgtggcggcgtggcgggcagcgttcgacgaaatctggcagcgcctgccaacgacctcccagccgccggcccagcgtatagcgttgaacgactggcgggcggcgattgccgccgccggccagccgggaagaggcggtaagatcctgctggatttcaccgctggttaagattactttttcttttcgcccagagtaggggtttcgtcaaagaagttccacggcttgagcagcgcgtgcgcccactcggtcggcatgatcggccactcttcggcgcgcgccacgtgggtggtgccggtggtgatccacacgacgtcatcgtggttagtcagcgactcatcatccttcgcgtactggcccaggccggtatcgtgggcggaacggttcgggtatttcccttccggatatcgctctgtcgggtggtagcgcgtcacccacagctgtttatccataaagctcaggcgatgatatatccactcgtccggggcgaatttggcaccggtcgccgccgggtgcgtgccgccggcgtaagggataatctggtatgagaccgggttgcccatgcggttctctttgctggtgttgctcagcaggcggatagtgcccgggtcgaatttctgcgccgctttctgctcgctatcgattgtgtactgattcacctgcatggtgctggtgcgcgggccgccggcggtgttgggcttcacttcaggatccatcgccaccagggtgttgttctcgccgtccacatcgaggtcgaggcggaagttatagatgtgctggtgagtggtgccgacaatattatggtcgatcaacgttccgtagcgggtatcctctttggcactggggtcatgcatggtcttcgccagcacgcctttcaccgcttcaatgccggtggcgccggcatcgataccgatggtgccgttgtcgtggaacacccagtcaaagatatagtcgtagttgccgacggtgctgatccagcgtaccaccagttcccggcgttcggtgctgacgttgggtttgcccatctccaggtgcttatactcaggcccggcatagcgttcgaatatggccaccgcgcctggaatcgtggtcggtttgccggtgtaatcggcgatagtttcgtccagcagtaccgcatttgacggcgcatctttaccgcgaacaatcggcgacgtcagggtgcccatgccgtaatcgccggagtcgaggtaggctttgaaataccagccgacgtccgggtcgccgtaggggacgatcatcccgccgagggaaccttcatacatcacctggcgttttgtgccgttatcgttgtaagtcaccgttgacagaattggtccgacgcgcgagttaagacgcaggtggaaatcccagttctgccagtgaatggtatcgccggtaatggtgtagtttttgccttccggttcggttatctccagcggtttcaccgccggggcgttgcggtcgcgaccatcatacggacggggctccattgggaccgggatcaccggaccttcttcgattttgatgattttcttcgcttcaaggtcgaccaccgccaccaggttttcaatcgggtgcgcccagtagttgccgtcgccggtatccagataactgaccaccttcagcagacgcgcatcctgctgcaggccatctttgccatcaaaaaagccaacggtgagcggggtggtgaccactttgccaggatcggtaataccgtgctttttcagcacctcagcgaattcgctgctggtattgatgatgttctgcacgctgacaaaatcatcgagcagcaccatcccgtgggcgcctttgatcggcgtccaggaaaggatttttttgttttgcagatcgaccacggcttcaatgacgtgtttgccatcgagcatcaccacatcggcagtgcggggagcatcgaccggcgttccctgcagggcaaaggcccataccgccgccttgtccggctcgtgtaaggaaatctcagtaaagcgggtattcggctgaaactccggcgcggctttgacaatggtcaccgcttcactgatttccgccgccgagagcgagtttaacgggtgcgggcgcttttccacctggaaggtctgatcgagaccggactggaagacatcgttgataaaggtatcggaaacccaggctttaccttccttcattaccacaggcaccggtaggtcaagggatttaccgttgacgatcgccgttttggcgccgggctttactttgacgtaagcgccgtcttttatcagggtgaacatttgcgcgtagtcatcccactgcacatcagcgccgaattcctgcagcgttttatccagcggtaccatgtgggcttcgctaccgtgagcgaagaccggtgattgccaggcgcaaaccaccgccacggccagcgccagcgcggttttacgaggagaaaatttcaagccgtttgccattgtgacctcatcttattgttgtgttgtctcttgccgctgcgaatgtcggctttgtcatccttaagctaccagccagcggcgccggggcgtttgtttgcttttgccagcttgtttgtcagttttgccagacgggcgtaaaaaatgcctccgcagaggcattgagaacgagcgctgatttttttgccgggtggcggctgacgccttacccggcctacggtccgtgcggcctgccggtaatttattcaccattcttgctggccctagcccgggggtacagggggcagcggcgactggccgccccctgtgcgctccctgcgctatgccaggcataacgcagacgattaaccgggagcgcaatgtgcgctgaagccacggataacataaaggacttcccggggcgaaaccgttgcaaaccgattgcagtatcaatggctaaagggtcggccaacagagcgccagcggtctatttttcgctatcacgccgggaaatctccgtgttgacgcgccaccagggtcagaatggaatacagcgccaccgcctgctggtgctggttgaaaatctccaccgcccattccaccacgccggtggctttctcatcggcgctgcgctgacgtttgaccgttttacgcttacaggtcaggcgaacctgaatggtgtcgcccggtttgaccggctcaataaagcgcaggttttccatcccatagttggcgataaccggcccgacgccggcatcgacgaacagcccggccgcggcggagatcaggaaatagccgtggaccacccgctcgccaaaaatcgactcggcggcggcgattttgtccatgtgcgcgtagaaatgatcgccgctcaggcaggcgaagttaacgatatccgcttcggtcagggttcggcgcggggttaataagctgtcgccaggctgaatctcttcgaaatatttgcggaacgggtgaatacggtcttcgttcacctgggcgccgcgcacccactgttgaccgatggtcgccagcatcgttgggctgccctggaccgcggtacgctgcatatagtgtttcaccgaacgcagcccgccaagctcttctccgccgccagcgcggccggggccgccgtgcaccagctgcggcagcggcgaaccgtggccggttgactcgaccgaggacgcctcgttcagtatctgaatacggccatgggcgcgggcggcgccgaggataaactcgcgcgccagctcgccgctggcggtgaccagcgtccccgccagactgccgccgccggcgcgcgccagcgtcagcgcatgctggcggtcacgatacggcatcagcgtcgccaccggaccaaaagcttcaatggcgtgaaccgccggcgtttcatccggctgtgagcagtacaacagggtcggcgggaaaaatgcgccggccgcgctgagatccgcctctccaccgagcagtacttcgcagccagcggctatcagcttattgacgctctcctgtacgtcctgacgctgttcgctattaaccagggcccccatcttaacgccctcctgcgcagggtcaccgacggttactttatgcaggcgggagatcagtgcatcgctaaccgcattaatctgagccagtggcacaatgattctgcggatagcggtacatttttgcccggctttcgccgtcatctcgcggaccacttcccgaataaacagcgcgaattccggttgctccggagtgacgtcttcgcctaacacgcagcagttgagtgaatctgcttccatggtaaagggaatggatttggctaccaggttagggtgcgcccgtagctgctggccggtggcggctgacccggtaaaggtcaccacgtcctggctatcgaggtggtcgagcagctcgcccgcgccgccgcaaatcaggctgatggcgccctccggcaccaggccgctgtcgacaatcgctttcaccattgcctgggtgagctgggcggtagcggtggccggtttaatgatcgccggcataccggcaagccacgtgggcgccagtttttccagcattccccagcaggggaagttgaaggcgttgatatggacggcgacgcctgatttcgaggttagcacatgacgcgcggcaaaaccgccctgtttggagagcgggatgagctcgtcttccggccacaggatatcgtccggtaattctcgactaccgagcccggcataggtgaaaagggtaccgataccgccttcaatatccacccaactgtcggcgcgagtggcgccggtttgcgcggagatggcgtagaactggtctttctgctccagcaggtgtttcgccaccgctttcagcatcgcgctgcgttcaataaaggtcatcgcctgcagggctttgccaccgcgctcaatcgcgaagcggcgcgcctgcgccatatccaggccttcactggtcacctcccaaagcgctgcgccggtgatggcgtgatggatagtacgggcgcggccccggccggtctgccaggcgccggataagtagctggctaactgctgcatcgcaaatctccaaatgtgttacgtgtgatatctataaatagttcttttatgaatcataaaatgcaagcccgtatttaataaattattaacattgtgatcgcgatggggttacgccttatgcttaacttactgtattaattgtggtttacaaaaggttttgcggagattatcacaaaaagagcaaacaaaatttgtggttttatttaaccaatatgtaaccttcaataaacaaagtgattcacataaatgtttttgttgtgaatatcggaatcataaaggtgatgacgtgacagaagaacaacgctttgaccagcgcatcgcgcaggaaacggccatcgaaccgcaggactggatgccggatgcctaccgtaagaccttgattcggcagataggccagcacgcgcactcggagatcgtcggcatgctgccggaaggcaactggatcacccgcgcgccgacgctgcgccgcaaagcgatcctgttggctaaggtacaggatgaggctggacacgggctgtatctctatagcgccgcggaaacccttggctgcgcccgggaagacctgtatcagaagatgctcgacgggcagatgaaatactcctccatttttaactacccgaccctcagctgggcggatatcggcgtgatcggctggctggtcgatggcgcggccatcgtcaaccaggtggcgctgtgccggacctcctacggcccctatgcccgggcgatggtcaaaatctgcaaagaagagagctttcaccagcgtcagggttttgaagcctgcatggcgctggcgcagggcaatgaggcgcagcggcagatgctgcaggacgccattaaccgcttctggtggccggcgctgatgatgtttggccctaacgatgacaactcgccgaacagcgcccgcagcatggcgtggaaaatcaaactgcactccaacgacgagctacgtcagcgcttcgtcgacaataccgtgccgcaggtagagatcctcggtatgactgtcccggacccggatttgcagtttgatgaagccagcggccactaccgcttcggcgaaatcgactggcaggaatttaacgaggtgattagcggccgtggcatttgcaatcacgagcggttggccgccaagcgtaaggcctgggaagagggcgaatgggtgcgcgaagccgcgctggcccatgcgcaaaaacagcaggcccgcagcgcggcatgaggagagacaacatgagcaaagtttactggccgttatatgaagtgttcgttcgcagcaaacaggggttatcccatcgtcacgtcggcagtctgcacgctgccgatgatcaaatggcgctggagaatgcccgcgatgcctacacccgccgcagcgaaggctgctcaatttgggtggtgaaggccagcgaaatcgttgcttcgcagccggaagatcgcggcgaattcttcgacccggcggaaagcaaagtctaccgtcatccgactttctataccgtgccggacggcatggaacatatgtgaggcggcgatgaataaccctaaccccgtagccacctacgccctgcggcttggcgacaatggtctggttctggcccagcgtttaggcgcctggtgcggacatgctcccgagctcgagatcgatcttgcgctggccaatatcggcctcgacctgctcggccaggcgcgcaattttttaagctatgccgccgagcttaacggttgcggcgacgaagatacgctggcttttggccgcgatgagcgccggttcagcaacctgctgctggtggagcagccaaacggcaattttgccgacactatcgcccgccagttctttatcgacgtctggcatgtcgccctgttcagccggctggtgaacagccgcgacgcgcagctggcggccattgccgctaaagggctgaaagaggtgcgttaccaccagcgctttagccgcggctggctggagcgtctcggtaacggcaccgaattatcaaatcgcaaaatgcagcaggcggtcgacaatctgtggcgcttcaccggcgaactgttcctcgctgatgaagtggagctcagcctggttgagcagggcattgcggttgatccgcgtgaactgcaggccgaatggcaaagcgcggtacacacggcgcttctcgactccggcttacagatcccgcaggaagcggccttccgcagcggcggcaaacaggggctgcacagtgaacatctcggcccgctgctggcggagatgcagtatctgcagcgttcgcatcccggactgcagtggtaagtgaggtgactatgcaacgtcttgccgatatcgctcctgcagaggttcgcaccatctggggattattaagcgcgatcccggatccggaagtgccagtactcaccatcaccgaccttggtatggtgcgcagcgtcgcgcgccatggcgacggctgggtgattggctttaccccgacctattcgggctgtccggcgacggagcatctgctgggggagatccgcacggtcatgagcgagcatggctttcagccggtacatatcgtcctgcagctggatccgccgtggaccaccgactggatgagtcaggatgcccgcgagcgcctgcgccagtacggcatcagcccgccccaggggcacgcctgccatgcggacatgcccgctgaggtgagctgtccgcgctgcggcagcgcccatacctcgctgattagcgaattcggttccacggcctgcaaagcgctctatcgctgcgacagctgccgggaaccttttgattactttaaatgtatttgaggttgccatgacgacgttctattcgcttaaggtggcgagagtcgagccggaaacccgcgatgcggtgaccatcacttttgcgatcccgcaagccctgcaggcggaatactgttttcgcccgggccagcatctgacgctaaaagcccgtctgggcggcgaagaactgcgccgctgttactccatttgtcacagccgcacgccaggcgaaattagcgtcgcggtcaaagccatcgacggcggacgcttctcgcgctacgcccagcacgatatccagcagggtatggagctggaggtgatggtgccgcaggggcatttcggttatcaaccgcaggccgaacggcagggagaatatctggcgattgccgccggctccgggatcacgccgatgatggcgatcattagcgcgacgctagcgaccgagccgcaaagccgctttacgctgatctacggcaaccgcagcagccatagcatgatgttccgccaggcgctggccgatttaaaagaccgctatccgcagcgcctgcaggtgatccacctgtttagccaggagtcgatggacagcgatctgctacaggggcgcattgacggcgacaaactgcgccagctcgctgaccatctgctggatttcagccgtttcgacgaggcctttatctgcggtccggcggcgatgatggacgaggcggaagcgacgttacgtgaacttggcgtagcggagaaatcgattcatctcgaacgctttaataccccaggcggcaatgtgaagcgggccgctggagtgcaggcggaagggcgcacggtgaccatccgccaggacgggcgcgatcggcttatcgccctcagcgccgaagacgacagcatcctggatgccgcattgcgtcagggcgccgatctgccgttcgcctgtaagggcggggtatgcgccacctgtaaatgcaaagtgctgcgcggtgaagtggcgatggccgccaattacagcctggaagcggatgagctggcggcgggctacgtgctgagctgccagtcattgccgaccagcggcgatgtggtggtcgactttgacgcgcgggggatggcatgagcgacctgctgatccaccgtcatggccgggtgcttcagttgacgctgaaccgcccgcaggcccgcaacgcgctgaacaatgccttattaacccagattgccgaggcgctggaggcggcggcagttgatgacagcgtcggcgtctgcgttatcagcggtaacgcgcgttttttcgccgccggggctgacctcaatgaaatggcggaaaaagatctgcctgccaccctggatgatattcgcccacggttatgggggcgaatcgatgcttttactaagccgctcatcgcctcggtcaacggctacgcgctcggcgccggctgcgagctggctctgctgtgcgacctgattgtcgccggtgacaacgcccgctttggcctgccggaaattaccctcggcattatgccgggcgctggcggcacccagcggctgatccgcagcgttggcaaggcgctggccagccggatggtgctgagcggcgagagtattgacgcccgccaggcgcagcaggccgggctggtcagtgatatccatccggcggcgttaaccgatgagtatgccctgaaactggcaaccaccattgcccgccattcgccgctggcgctacgggcggcaaaacagtcgctgcgcctgtcgcaggaagtcagcctgcaggccggtctacaacaggagcgccagctgtttagcctgctgagcgccaccgaggaccgccgcgaaggcatcgacgccttcttacaaaaacgtaccccggaatttaaaggacgctaatcgtggaagctttcattctcagcgcagtggaacagggcgtcatgaccattaccctcaatcgcccggaccgcctcaacagttttaacgatctgatgcatcaccagctggcggaatgtctgaagcaggccgagcgcgatgatggcgtgcgctgcctgctgatcaccggcgccggccgcggtttttgcgccggccaggatttgaacgaccgcaatgtcgaccccagcggcccgccgccggatctcggcatgtcggtagaacgcttttacaacccgttagtgcgccgtctggcggcgctgccgaaaccggtcatctgcgcggttaacggcgtggccgccggcgcgggcgctaccctggcgctgggctgcgatatcgtgctggccgcgcgttcggccaaatttgtgatggcgttcagcaagctcggcctggtgccggactgcggcggcagctggttcctgccgcgggtggccggccgtgcgcgcgcgatggggctggcgctgctgggcgacagccttagcgcggaacaggccgctcagtgggggattatctggcaactggtggacgattcagaactggcggataccagtctgcaactggcgcgccatctggcggcgcaaccgacgtttggtcttgggctgattaaaaaggcgctgctggcctctgaaaccaacagtctcgacgcgcagctggacctggagcgcgattatcagcgtctggccgggcgcagcgatgattaccgcgaaggggtcagcgcgtttctggccaaacggccaccacagttcagcgggaaatagatgatgacgacatccttagccaccgtggcggtgatcggcagcggcaccatgggggccggcatcgccgaagtggctgccgccgccgggcatccggtgcgtatttttgatattaaccctaaggctgtagacctggcgatagagggtatcgccgggcgtctggcgtcacgcgttgcgcggggcaaactggcgtcagagcaggctgatgcgctgctggcgcgcctgcatccggcccacgatttagccgcacttgccgacgcggatttagtgatcgaagcggcctctgaacggttggaagttaaaacggcgctgttcgcgcagctggcggcgatctgcgcgccgtcaacgctgttgaccagtaatacctcgtctatttcgattaccgctatcgccgccggggtcaaaaacccggagcgggtggccggactgcacttttttaatccggcgccggtgatgaagctggtcgaggtggtgagtggtcttgcgacctccaccgaagtggtggagcagctgtgccagtgcgtaagcggctgggggaaacagccggtgcgctgccgctcaacgcccggttttatcgttaaccgcgtagcgcgtccgttctacgctgaggcctggcgcgcgctggaagagcaggtcgccgccccggagattatcgatgccgctttgcgtgacggcggcggcttcccgatgggaccgctggcgttgacggacctgattggccaggacgtcaacttcgccgtgacctgttcggtgtttaacgccttctggcaggaccgccgctacctgccatcgctcctccagcaagagctggcgctggccgggcggctaggtaaaaagagcggccacggcgtctatcgctggcccgctgagacactgccggacgcggcgctgccgccggtaatgataggtgctgaatccgttaccgtcagaagtgacaacgtcactgaattagacgatgtcttgctgctggagactgaaggcgagaccgccctggcgctgagtattaagcatcaccgcccggtggtggtgtatgacctgtgcgccagcgatacggtggtgctggccgcagcggcaaccaacgcgcctgcggccactgataaggccgtgcattacttccagcagcagggcaagaaagtgctgcgtattgccgattatcccggcctgctggtgtggcgcacggtggcgatgctgattaacgaagcgctggatgcggtgcaaaaaggtgtcgccagcccgcaggatgtcgataccgcgatgcgccttggcgtcaactatccgcatggcccgctggcatggggagaacgccttggctggcggcgggtgctgcaactgctggagaacttgcaacaccattatggcgaggagcgctatcgcccctgttccctgttgcgccagaagacgctgatggagaagcaccatgagcaatgatccgtggcgcaacgcgcgcgtgatgtacgaaaaagatacctgcgccagaaagatggggatcgaacttatcgaaatggacgacggttttgcgcagatgagcatgaccgtctcggcggacatgcttaacggccatcaaacctgtcacggtggtcagctatttacgcttgccgataccgctttcgcctacgcctgtaacagccaggggctggcggcggtggcctcggcggcaagcattgattttcttcgtccggcgtttgccggcgaccggctggtcgccaccgccagagtcaaacagcagggcaagctgaccggcgtctacgacatcgaaattgttaatcaacagcaaaagattgtggccctgttccgcggcaaatcacaccgcatcggcggcacaatcacgggagacgtgtaatgcgcgacgcctttatttgtgacgggatccgtacgccgattggccgctacggcggcgcgctggccagtgtgcgcgccgacgacctggcggcgatcccgctgcgtgagctcctgagtcgtaatcccgggctcgacccggcagcaattgatgatgtgattttcggctgtgcgaatcaggccggggaagataaccgcaacgtagcgcacatggcgacgttgttggccggttacccgcataccgtgccgggcaccacgattaaccgcctgtgcggatcgggtctggatgccatcggctttgccgccagggcgatcaaagccggcgatgccgatctgctgattgccggcggcgtggaatcgatgtcgcgtgcgcctttcgtgatgggaaaagccagcgcgccgtaccagcgtcaggcggaactctttgataccacgattggctggcgttttgtgaacccgctcatggcgcaacacttcggaactgacagcatgccggaaacggccgagaatgtagctgaattgttaaatatcagccgagccgatcaggacgctttcgcctggcgcagccagcagcgcacggcgcaggcccagcgcgacggcattctggcgcaggagattgtgccggtgcagattgtcggccggaaaggggcggttagcgacgtgcgcgaggacgagcatccgcgcccggaaaccacgcttgagcagctggcgaaactgaaagcgccgttccgccagggcggcgtcattactgcgggcaatgcttcaggcgtcaacgatggcgccgcggcgctgatcatcgccagcgaacagcaggccgctatccaggggctcacgccgcgggcgcgtatcgtggcgatggcgacggcgggtgtcgaaccgcgcctgatgggactggggccggtaccggcggtgcgtaaagtgctggagcgggcgggactcaatattaacgatatggatctgattgagctgaatgaggccttcgccgcccaggcgctgggggtgctcagacagctcggcgtgccggacgatgcggcgcacgtgaatcccaacggcggcgccatcgcgttaggccatccgctgggcatgagcggcgcgcggttagcgctgagcgccagccttgagctgcaacgccggggcgggcgctatgcgctgtgtacgatgtgtattggcgtgggtcagggcattgccatgatcctcgagcgagtgtgagctaatttacctgcgagtaccctacaatgataactactacaaaattagatccgattgaaaccgcatcgcgtgacgaactgcaggccctgcaaacccagcgcctgaaatggacgctgaagcatgcgtacgaaaatgtgccgatgtatcgccgcaaattcgacgccgccggcgtgcaccctgacgactttcgggaattaaacgatctacaaaaattcccctgcaccaccaaacaggatctgcgcgacaactatcccttcgataccttcgcggtgccgatggagcaggtggtgcgcattcacgcctcttccggcaccaccggcaaaccgacggtggtggggtatacgcaaaacgatattgataactgggccaatattgtcgcccgttcgctgcgcgcggccggtggttcagcaaaagataaaattcacgtcgcctacggctatggcctgtttaccggcggccttggcgcgcactacggcgcggaacgtttgggcgcgacggtgatcccgatgtccggcggacagaccgaaaaacaggcgcagctgatccgcgatttccagccggatatgatcatggtgacgccgtcctactgtctgaatctgattgaagagctggagcgccagatgggcggcgatgcccgcagctgttcattgcgggtcggcgtctttggcgctgagccgtggacgctggcgatgcgcgcggaaatcgagcgccggctggggatcaccgccctggatatttacggtttgtcggaagtcatgggaccgggcgtagcgatggagtgtctggaaaccgttgacggcccgactatctgggaagaccacttcttcccggaaatcgtcaacccggacgacggtacgccgctggaagatggcgaacatggtgagctgctgtttaccaccctgaccaaagaagcgctgccggtgatccgctatcgtacccgcgatctgacgcgcctgctgccgggaaccgcgcggaccatgcgccgcatggatcgcatcagcggacgcagcgacgatatgctgattatccgcggggttaacgtcttcccctcgcagctggaagaggagatcctcaagtttgaacacctggcgccgcactatcagttagaggtcaatcgccgcggtcatctggattcgctggcggtgcgcgttgagctgaaagagagcgggctggcgctgagtcatgaacaacgctgccagatttgccatcagttgcgtcaccgcattaagtcgatggtcgggatctccaccgatattactatcgtcaactgcggcagcattccgcgctcggaagggaaagcctgtcgggtattcgacctgcgaaaagcggtggttagcggttaatcctctccccgataacccggctgaggcctttacgccgtaagccgggaatttcctgtgctatgattcataaaggaaaaatataacaacagaatgaatcagatgagtaaactcgacgcctttattcaacaagcggtgacggcgatgcccatcagcggcacgtcattaattgcctcgctgtatggcgacgctttattacaacgcggtggggaagtgtggctgggcagcgtcgcggcgctgctggaaggattaggcttcggcgagcgcttcgtacgcaccgcgctgtttcgcctcaataaagaagagtggcttgatgttgtccgcatcggccggcgcagcttctatcgcctgagtgataaagggctgcgcctgacccggcgcgcggagcataaaatttatcgcgccagtgccccggaatgggacggtacctggctgctgctgctttcggaaggcctggagaaaaatgtgctcgccgacgttaaaaagcagctgctgtggcaggggtttggcgcgctggcgccgagcctgctggcctcgccgtcgcaaaagctggccgatgtccagtctctgctccacgaagcgggcgtcgccgaaaacgtcatctgttttgaagcccattcgccgctggcgctctcaagggcggcgctgcgcgaccgcgtagaggagtgctggcatctcaccgaacaaaatgagatgtacgaggcgtttatcgcattgttccgaccattactgccgctgctgcgcgacagcgagccgtcagagttgacgccggagcgctgtttccagatccaactgctccttatccatttctatcgccgggtggtgctcaaagacccgctgctgccggaagagctcctgccggcgcattgggcagggcaaaccgcccgccagctgtgtatcaatatttatcaacgcgtgagtcccggtgcgctggcgtttgtcagcgagaaaggtgagagctcggtgggcgagctcccggcgccgggtccgctctattatcagcgctttggcggtttgccgggcgcataaggaggctgcatgccgatatatcagattgatggactgacgccggtggtgccggaggagagttacgttcacccgaccgcggtgttgattggcgacgtgatcctcggcaaaggggtctatgttgggcccaacgccagcctgcgcggcgacttcgggcgcatcgtggtcaaagacggcgccaatattcaggataactgcgtgatgcatggcttccccggccaggatacggtggtggaagaggagggccatatcggccacggcgctattctgcacggctgcgtgattggccgcaacgcgttggtgggcatgagcgcggtgattatcgacggggcggtcattggcgaaaacagcattgtcggcgcttcggcctttgtcaaagccaacgccgagatgcccgccaaccatctgattatcggcagcccggcaaaagcgattcgcaccctgagcgaacaggagctggcgtggaaaaaacaaggtacccgtgaataccaggcgctggtggaacgctgtaagcagacgctgcaccaggtggagccattacgggaagtcgaagcagggcgtaagcggctggcgtttgatgaaaacctgcggccaaaagccgcaacctgaggggtaaaattatggcagagaaattatccgctcactgtcactgcggtgcggtggcgtttaccgtggaactcagcgacggcttcaacaccgttcggcgctgtaactgctcatattgtcgcatgcgtggggcggtcgcggtctcttcgccgcgttcaggaatagaggtggtacgcggaggggataagctcacagagtatcgctttaatacaggggaagccgtgcactttttctgctcggtatgcgggatctacacctttcatcaacggcgatcaaacccacagcagtatggggtgaatgtggcctgcattgacggcgtttcgcctttcgatttcccttgcgtggaggtcaacgacggcgtgaatcatccaaaggatggcggcggaggcgtggtggggtatttacgctacgagaaaaagtaaaactctcctcccgcaggaagcgagaggagtgaaatattaggctgcaaccacgctgtcgatggccgctttcgcgtcagactgcgctttggccgcgacttccgggccgtaagcgataccttcggcgaacacaaagttcacgtcggtgatgccgatgaagccgaggaaggtggacaggtatggggtgaccaggtcggtcggagtatctttatggataccgccgcggctggtaacgacgaccgcgcgtttaccggttaccagaccttccggccctttctcggtgtagcggaaggtgacgccggcgcgagccaccaggtcgaaatagtttttcaactgcgtcgggatgttgaagttgtacatcggcgcagcgataacaatcacatcgttgcctttcagttcggcgatcagctcgtcggaaagggccagcgcttcctgctgacgcggagtcagcggcgcgtcgctcggacgcagggcgccaaccagttcgccatccagaaccgggatcggattggcggccaggtcacgcacggtgatctcatcgccagggtgtttttcctgccattgttcaacaaaatagtcggaaagctgaccagattgtgagtaccctgccagaatactggatttcagaactaatactttgctcatgggtgtttcctttttttaatgtgattgacgggtcaatgccctggtgcttgttgacactgtattcacaatcgcgccacagagatagcgcaatatatcgaatcctatgttcagattttttgaacaaggcgcgaatgacacagatgtggtactctaaggcaatacttcaaaagagattttcccggcagagctctgcccgataacgctatgacagaacaacaaaaaatcaccttcccccagctttatcaacagctcgacggcctgatgctgcgcgacaaaacgcgctttgcccgccgtctgcacggcgtgaagaaggttaaaaatcctgaatcgcaacaggccattctgcaggagatggcgctggagataagccaggcagccggtaaagtcctgctgcgcgaagcggcgcgtccggccatcacctatccggaaaacctgccggttagccagaaaaaacaagagattctcgaggcggtgcgcgaccaccaggtggtgatcgtcgccggggagaccggttcgggtaaaaccacccagttgcccaaaatctgcatggagctggggcgcgggctgaaaggactcatcggccatacccagccgcgtcgcctggcggcgcggaccgtcgccaatcgtattgccgaagagctgcagagcgagccgggcggctgcatcggctataaagtccgcttcagcgaccacgtcagcgaaaacaccatggttaagctgatgaccgacggtatcctgctggcggagatccagcaggatcgtctgttgatgcagtacgacaccatcattatcgatgaggcgcacgagcgcagcctgaatattgactttctgctcggctatctgaaagagctcctgccgcgccgcccggacctgaaaatcatcattacctcggcgaccatcgacccggaacgtttctcaaagcatttcaataatgcgccgattatcgaagtctccgggcggacttacccggtggaagtgcgctatcggccgatagtggaagaggcggacgataccgagcgcgatcagttacaggcgatctttgatgcggttgacgaactggggcgcgaagggcccggcgatattctgatctttatgagcggtgagcgggaaattcgcgataccgccgatgcgctgaataagctggatctgcgccataccgaagtgctgccgctgtacgcccgcctgtccaacagcgagcagaaccgcgtcttccagccgcacagcgggcggcgcatcgtgctggcgaccaacgtggcggaaacctcgctgaccgtgccgggcattaagtacgttatcgatcccggtactgcgcgtatcagccgttacagctaccgcaccaaggtgcagcgcctgccgatcgagccggtttcccaggcgtccgccaaccagcgtaagggccgctgcggccgcgtttcggaagggatctgtattcgtctttattcagaagacgatttcctgtcgcgcccggaatttaccgacccggagattctgcgcaccaacctggcgtcggtcatcctgcagatgaccgccctgggcttaggcgatatcgccgccttcccgtttgtcgaagcgccggataagcgcaatatccaggacggcgtacgcctgctggaagagctgggtgccatcaccaccgatgagcaggccaccgcctataagctgacgccgatgggccgccagctcagccagctgccggtggacccgcgtctggcgcggatggtgctggaggcgcagaagcacggctgcgtgcgggaagcgatgatcatcacctccgcgctgtcgatccaggacccgcgcgagcggccgatggacaaacagcaggcctctgacgaaaaacatcgccgcttccacgataaagagtccgatttcctcgccttcgtcaatctgtggaactacctcggcgagcagcagaaggcgctgtcgtcgaatcagttccgccgccagtgccgggtcgattttcttaactatctgcgcgtgcgcgagtggcaggacatctacacccagctgcgccaggtggtgaaagagcttggcctgccgatcaacagtgagccggcggaatatcgcgagatccatactgcgctgctgaccggtctgctgtcgcacatcggcatgaaggatgccgataagcaggagtttaccggcgcgcgcaacgcccgcttctctattttcccgggttccggcctgtttaaaaagccgccgaagtggacgatggtggccgagctggtcgagaccagccgcctgtggggccgcatcgccgcgcgcattgagccggagtgggtggagccggtagcgcagcacctgatcaagcgctcatacagtgagccgcactgggagcggtcgcagggcgcggtaatggcgacggaaaaggttaccgtttacggcctgccgatcgtcgccgcgcgtaaggtcaactacagccagattgatccggcgctgtgtcgtgagctatttatccgccacgcgctggtagagggcgactggcagacgcggcacgccttcttccgcgataacctgaagctgcgcgcggaaatcgaagagctggagcataagtcgcgccgccgcgacatcctggtggatgacgagacgctgttcgagttctacgaccagcgcatcagccacgacgtcatctccgcccgccacttcgatagctggtggaagcgggccagccgtgaaacgccagacttgctcaattttgaaaagagcatgctgattaaagagggggcggagcaggtcagtaaactggactacccgaatttctggcatcagggcaacctcaagctgcggcttagctaccagtttgaacctggcgccgacgccgatggcgtgacggtgcatattccgctgccgctgctcaaccagatagaggaagccgggtttgaatggcagatccctggcctgcgtcgcgagctgattatcgcgctgataaaatcgctgccgaagccggtacggcgcaatttcgtcccggctcccaactatgcggaagcgtttcttggccgggcggcgccgcttgagctgccgctgctcgattcgctggagcgcgagctgcgtaagatgaccggcgtgaccatcgaccgcgaagcctggcagtgggatcaggtgcccgatcacctgaaaatcaccttccgggtggtggatgataaaaacaagaagctgcaggaagggcgctcgctgcaggcgttgaaagacgccctgaagggcaaagtgcaggagacgctgtcggcggtcgctgatgacggtattgagcagagcgggctgcatatctggagctttggcaccctggcggaaagttacgaacagaagcgcggtaactataaggtgaaagcctggccggcgctggtggacgagcgcgacagcgtggccatcaaactgtttgataatccacaggaacagcagcaggccatgtggcgcggtctgcgtcgcctgctgctgctcaacatcccgtcgccgattaagtatctgcacgagaaactaccgaataaagccaagcttgggctctactttaacccgtacggcaaagtgctggatctgattgacgattgcatctcctgcggcgttgataagcttattgacgaggcgggcggtccggtgtggacggaagagggctttagtcagctgcacgataaagtgcgagccgagctcaacgacacggtggtggagatcgctaaacaggtcgagcagatcctcaccgcggtgttcaatatcaacaaacggctgaaaggccgggtggatatgaccatggcgctggggctgtcggatatcaaagcgcagatggcgggtctggtgtatcgcggctttgtcaccggcaacggtttccgccgtcttggcgatacgctgcgctatctgcaggcgattgaaaagcgtctggagaagatggctatcgatccgcaccgcgatcgggcgcagatgcttaaggtggagagcgtgcagcaggcgtggcagcagtggctgaataagctaccgccgaaccgccgtgaggacgacgatgtccgggagatccgctggatgatcgaggagctgcgggtcagcttcttcgcccagcagctgggcaccccgtatcctatctcggacaagcgagtgttgcaggcgatggagcaaattaccccatagcctggctggttgtccccggtggcgctgcgcttaccggggctactggtcaggcgtccacgcttaagcgtttacccacgccagagtaaagccgtcccagcctttagtgcccacggtttgcagcgccgttgccgtcaaccgtggctcggcgcccatcatctcaatgaactgacgcacgccctgaacgcgctcgtcggcgctctgtgggttgaccacttcgccgtcgcgtaccacgttatcgccaataattaaggttcctgggcgggaataacgtagcgcccagcgcagataatgggggttattcggcttatcggcatcgatgaagatcaggtcgaaagcgggacattcgccaagcgactccagggactgtagcgcgggtccctcccgtagcgtgacccgctggtcaacgcccgccagctgcagattctcccgcgccacctgggcatgatgcgcgtcggcctccagggtgaggagttggccgtctgcaggaagctcgcgcgccatccagatggtgctatagccgccgagggtgccgatctccagtatccgcttagcctgggttagccgtaccagcagggcgagaaactgaccctgattggcggcgacatcgtgtgccgggagcccggcacgatggttgttttccagtacccgatcgagcacaggatcgccgggaattaaggccttaatcaaataattgtctactgccgaccactgttgttgcatatgacgcttccccatttagctccctgatgagtcagaccagccgcctcccagcgcccggtacagatcgatctgcgccagcagcaggttgttcttcacctgcaccacgctaagctgggtggagaacagcgttcgctgggcatcaagcacatccagataagaagagtagccgttacggtagcggttttgtgcaatacgtaaggtttcctgggcaacggtctcttgttcctgaagctcggttaactgttcgccatagcgactgatggcgtccaggctgtcattgacctctttgaacgcgctgcgcaccgttttctcatagctatagagcgcctggttgcgctgggccatggagacgtccacctgggcatttaacgcctggcggtttagcagcggcgccagaatactgccgccaagactccacagccgcagcgggttgtccagcagatccggcagcgtccggtcctgcaggctgccggtagcggtcaggttaatagagggcagcagctgcgcctgcgacgaggccagcgtggcgtcggcggccaccagctggcgctcggcctgagcgatgtccggacggcggttgagcaaggtggacggcagctgcgacggcagacgcagcggggtaagctgggcgaactcgccgcgttttaccgcgccagggttatcgccgagcagcacgctgagcgcattttcctgctgcgcaatctggtgctgtagcggcgggatctgcgcccgcgttgaccgcagctccgaatccgcctgcatcagctcaaggcgtaaagtatacccggtttcaaactgacgtttggccaggcgccacgcgtcttcccttgatgttagcgtctgctgggtcacccgcagctgctcatccagcgacagcagcgtgacgtagccaacggccaccgagctggcgacgctcaaattggcggcggcggcggcggctttctgcgcctcaaggctggccccggcggcgttggccgcgctgcggttcgctccccagatatcgacatcatagctggcggtcaggccgcccttatacagtgtgctgtggatcggcaggccggtggcggcggactgcgtccgggcgcgggtgccggtgaggctggcgtccagtgacggaaacaggctgctgtcggcggcgtaagcgcgcgcctgatactcattcacccgctcgcgggcgatcagcacatcgctgttatagcgcagcgcctggtcgacatactgattgagggtactgtcatgaaaattgcgccaccatacaccctccaccgggctggccgggccaacgtcggcccgccaggcggcaagaatggtcagggtcggctgcgcgcgttgcacatcggcggattgacagccgaccagcgccagaacgatagcaagggcgaccgggcggatcatggttgtttctccgcacgggtatcaatagtcacctgcaccgacatccccggccgcaggcgttcgctgttgttttgcccgtcgttgaccgtaatacgcaccgggatgcgctgggcgatcttgacgaaattgccggtggcgttgtccggagagatggcgctgaactccaccccggtcgccggggagatactctgcaccttgccgtggaaggtctcgccgttgagcgcgtctacggtgaaggtgaccggctggccaacgcgtacttcggccaactgggtctctttgaggttggcaatcacccagtgctgcggcggaaccagcgaggtcagatgggttccggcgctgacataggcgccaagacgcaccgagatctgccccagctggccgccggtgggggcgataatctgggtattctgcaggtcgatctgcgccagctcaagcgccgctttggcgctggccacgtcggcctccagcgaatcgcgattgacgatggtcgattcacggtcctggcgcgacatctccagcgccgctttcgcctgctcaatatccgccgccccttgcgccgcgctggcccgcgccgaatcacgttcgcggatcgacagcgaaccgtcggcggttaactgctggatgcgttttaaatcggcctggattttcagattctgcgcgcgggcgttttgcagcgcggcttcattcttggcgatcgtcgcctcggcgcttttgcgctgttgcaggttattgcgcagcgcggcctctttcatcgccagggtagcctgggcctgatgcacccgctgtttatagatgcgatcgtctatctggaacagcacctcgcccggctggacaatcgcgaaatctttgacgttgacggcggtgatatagccgttgacctgcgggctaataaaggtggtctgcccgcgcacataggcgttgtcggtaaactggctatggcgagtgaacggcggcagttgccaggcgtagaggatcaccagcacgccgacgaggcctatcgccgcggcggtaaaaatggaaaccacgcgaatattattccgggtgttggcctgttgtttggccgcatcctgctgactcataacgactccagagatgaaatgatgataattatttgctgccggtagcgcgttgcaacgcgatacgggcagtcagtcgtaagcgaattaagcgccagaaaacccacactagtgtcccggcggagatcgccgccgtcagcagataggtatcattccaggcgagaatattggcctgcagcgtcgcggcgttttgcagcagggtggtggcctgaacgttgagcagcgtactgtcgccaatctggctctgatacatctggctgtactgctgcagccgctcgacgatcagcgggttcagggtggttatctggtccgccagctggctggagtggaatttctcacgccaggtctggaaggtgccgaggatcgccgagccgagcagcccgccaatgttctggctcatgccgaacagcaccgagaagctgaccaggttgcgcgggtcggcaaacacgccgccaatcccggcgagcatcgccggggccagaaagaaggcgctgccgaagccgagtaaaaactggctgaacattaattgttccggacgggtgagggcgttggactggctgtcgagcagcgaggctatcatgatcagcgccagcgcggtggcggtcggccagtagagcttctgcgggttgagcgtcagacagctggcaatgatcccgcacagaataccggcgaaaatcgaccacgcgaggttagtcatctgttcgttttgcaggccaacgtactgcagccagccgatgaccccggtgttctgctccgccagcacgatgcggatcaacagcataatcaggcccagacgcacgatgctgccgctggagagccatttggtattgagcagggggttgctgcggttatgctcgaaggtaatcgcagcgacgatcagtattaccgccgccgccagcgcccagccgatccacggcgcttcaaaccaccactcgagccgccccagcgacagcacggcgcacaccagcgccatgccgggcgccagcagaaagaaggtaatgaaatcctttttttcgaacacttttttacgatcgcttggcggcagttttagcgcgatgacgcaggccagcgacaccagcgccaggcccagctcaaagaagtagagaccgcgccattcatcggtctgcagcagttcggtggaaaagaggcgcgccaggggaatggctagcgacgagccggtgatgccgatagtcagccctttcaggcgatgccgagcaggccaggcctgtacctggtagtagatccccagcgagctgagcgccgcggccaccatgccatgggcggcgcgaaccatcatcgctgagctgagatcgttgacgaagaggtggaaaaaggtgaccagcacatagagcaccagaaagccttcggtgaaagcgcgcaggccaaactgctggcggaatttcaccagcagcaggttgatggagacgttggtcatcacgtataccgccggcagccaggcgatttctgtcgaccaggcggcgaaggtaccctgcagcagctgcaggttggcggtgaccactgcgttgcccagcgcgccggtgagacataccagcagaccgaccacgccgtaggcaaggcgtttcgccggactgtgcagcggcgtcgacggcgaaccgagcagagccggtttttcatgcggcgcccagtcatgcggggcgtaggggttatcctggcgacggggcattatttcttctccacttcgcgcaacagcttttccagcacccgctgggtttgctcctgctcctgtggggtaatcgccgtcaggatctcttcgcgcagatcgtcagccaccgttttgacctgttcatagagggccttccctttgtcggtgaccaccagcagtcgcttacgtttgtcgctggcggtggtgatgcgctccaccagtccgagggcgaccagacgatggatcaacggcacaatggtcgggctctccacccccagctcctgcgccagttcgctttgcgacagcggctgctggtggcgggcgatggacgctaccgccacccagctggcctggctgagaccgagatttttcagccgacgattgaccgccagccgccagtggtgcgcggtgaggtataaaagatgggagaaggtaagctgtcgattgtccataggtcgtctgtcaatatcgttagagctctaacgattttatgccggataaccgccggagttcaagatgaaagatagaaattggttaacggtatgtacgttaattgtagttaaccttccggccgcgatccgtgtcgtgcggtctgctgaccgaggatatttttattctgcgccatcacccaggcgataaaggcccgcaggggggcgggaatatgtttccggcttgggtagtagacgcagaaatggtcggcaggatagcggtagtcgggtaacaaatggaccaggctgcccgcgctcagctgctgcgtcaccagcgactgatagacaaaggcgatgcctaatccgctctccgcggcctggatcattgcgctatcggcatcgacgaccagatcgcctttaaccgcgacctcgctaagctcgccgctggggccaataaactcccagcggtacttctcaccaccaggaaaacagcggttaatgcagcggaaattaactaatgactgcggggtgtcgggctctccggcttcgcgtatatagtccgggctggccaccgggatcagcgatagtttctcgccaaaggggatggcaatcatctctttgggcacatcctgcgaatagcgaatgccggcgtcaaaaccggactcgataatattgacttttcgatcggtggcatacagttcgagcgtcacattgggacaggcgtttttaaaggcgataaaatagtcttgaaaaaacaggtcaataacaatgcgcggtaaattaactttcaccacgccttccggagtcagacggtgataattcagactgtccaccacccggcgataatcattgaccaccggcgttatattattaagaaattcctcacccactgcggttaatgacaaactgcgtgttgagcgatttagcaggcgcacgcctaacttttcttccagatgattaatagcgacggtaagggccggtggggaaaggtttaacgctttagcggcctgacgaaaactgccatgtttcactatgagtattaatatttctatttgttgcagatcgggcaaggttttcattgttaatttccagctaacaccgcgttcggaatagattaattgttatcaatatgaaagggaagtatatatttaatgccattcagcaattaaggaaaataagatgaaaacacgttatcttggaaaagagaagtttcaggtttccgcattaggtctcggatgtatgggtatgagttttgcctatggcggcgctgaaacgtcgcaggcgataaatacgatccatgccgccatggacatgggcgtgaccttcctggataccgccgaagtatatggtcctttcgataatgaagttctggtcggaaaagcgattaaaggttttcgcgataaggtgcagattgccaccaaatttggatttcgtattttgccgaccggccagggtctggagcggatggccggcgttgacagccgtccggcacatattcgcgaatcagtggaagggtcgctgaagcgactgaatgtcgagaccatcgatctgctctatcagcaccgcgtcgatcccgcggtaccggtggaagaggtggtgggcactatggccgatctggttaaagagggtaaaattcgccatatcggtctgtcggaagtatctgctcagacgctgcgccgggcctgcaaggtacatccgatcgctgccgtgcagacggaatattcgctatggagccgcgagccggaggccggtattctccacacctgccgcgagctgggggtcggctttgtgccatacagcccgcttggccgcggcttcctgacggggacaattaccgaccccggcgttttggcagcggatgatttccgccgccatctgccgcgcttccaggccgaaaccatgcgcaaaaaccagctgctgcttgagcgcctgcagcaggtggccacccgctatgacgcgacccttgcgcagattgcccttgcctgggtgatgagcaaaggcgaggatatcgtgcctatcccgggggcgaggaaaattgctcacctgcgcgacaatgccggcgccgcgaatattaccctcgcggcggaggacatcctcaccatcgaacatattttcactgccgacaacgtcactggcttacgctatacccagggcgactttgatttaatcgaaaaataatcccctacgggcagcggatggttattacttgcgtgacgttgtcacatttgccgaacaactcctcgtcagatagcgcacatcctcggcggttaacggcgcggcaaagaaaaaaaggggcggcgcaaggccacccctgatgcggttgctgatggggatcagcccgggtagatgccgcggtctttacgcgccatcaggatgcgctcgcaggccacgatataggcggcggtgcgcagcgtacactctttctcggcggctttatcccagacgtgcacgatagcgtcggtcataatgcggtccatcttggcgttgatctcctcttcgctccagaagaagctggccatgtcctgtacccactcaaagtagctgacggtcaccccgccggcgttgcagataacgtccggcaccacgatcacgccgcgctcggccagcacgtcgtccgcttccggataggttgggccgttggccccttccagcaccagtttgcaggtcagcttctccgcgcgctcgcgggtgatttgcccttccagcgccgccgggatcaggatgtccatcggggtggtccagaaggcgtctttatcgatctcctgggcgcccgggaaaccggcaatctgctttttctccgcctgccaggcggtgagggcggccatatcgattccgccttcgttatacagggtcgcggtatgatcctgaataaccacgatacgagcgccgacgccagcgaacaggcgggccgcttcgctaccgacgttaccaaagccctgcagcgccactttggcgccttcaatttcgataccggcgcgacgggcaacttcccggccggtgacaaacacgccgcgtccggtggctttttcacgaccgagggagccgccgaggtggatcggtttgccggtgaccacgccggtgatggtggtgccatggttcatggagtaagtgtccatcatccatgccatcactttgccattggtgccgacgtccggcgccggaatatctttctgcggcccgataataatgccgatttcgctggtgtaacggcgggtcagacgctccagttcaccttccgacaaggagaaggggtcgacgcggatgccgcctttggccccgccgtaaggaatattgaccgcggcgcacttaatggtcatccaggcagaaagtgccatgacttcgttaagatcgacatccggatggtagcgaacaccacctttacccggtccgcgcgacagattgtgctgaacgcgatagccctcgaagtggcggatggtgccgtcgtccatttgcacaggaatgtcgacgatcagcgcgcgcttcggatggcgcagggtttccacccagtaggcaagatcgccgagataaggcgcgacgcggtcgatctggcgcaggtaggtggtccatggagatgtactactttcagatgcgtaagataacttttccataagagtcctgtttctcagtgttatttatgtcgtgtaaaaccgtggaatagctacagcagtaaactctgtgcaatgaatggtatcaccaattttataaagcggtatttgacggcaattccgatttttaaatttttgttagattttttattttttaagtgaataactacgcacgtcaaccacccgcaagctgtgcattttaattcactttttattcacttaagtgcataagaaaatattttttctatgtttttcattatcttgatgatcttaaaaaagtgaataaattgcttttgcccgtattgacaatcttgttgttcacaggccagcattagcccacacaacaacatggcattaaccatgaattaacaattacccgtaaaaaaaatagggctttatttttctgtggtgaatatttttaccatcgcagcgggcgcgctcgtgcccaaaataagccgaggggcagggttaatgtcgattgtccaacgcgacgggagcgttttccgtcgtcttacgttccggagataaattatgtcaggcagtatgactcgcgaagattttgacgcttacctggttccctgttttgcccccgcgccgtttattccggtcagagcggcgggctcccgcgtctgggaccagcaggggaaagagtatatcgatatggcgggcggcatcgcagtgaacgccctgggccatgctcacccggcgctggctcaggccctgcaggatcaactggcgaaactgtggcatatcggcaatggctataccaacgagccggtgctgcagctggcaaaaaccctcgtgcagtcgacctttgccgacaaggtgtttttctgcaactccggcgccgaagccaacgaggcggcccttaagctggcgcggaaatatgcccacgataagtttggcggtgaaaaaagcgaaatcatcgccttcaaccacgccttccacggccgcacgctgttcaccgtctccgttggcggccagccgaaatattccagcgattatgctccgctgccgcagggcattacccatctgccctataacgatatcgaggcggtcaccgcggcgatctcctcgcgcacctgcgcggtgatcgtcgagccgattatcggcgaaggcggggtgatcccggcggacccggcgttcctgcaggcgctgcgtaccctctgcaatcgccatcatgccaccctgatattcgatgaggtgcagaccggcgccgggcgtaccggccatctctacgcctaccagcattacaacgtcgtcccggacattctcaccagcgccaaagggctggggggcggcttcccgatcggcgcgatgctggcgaaagaggcctgggcgcaggtcttccagccaggcacccatggcaccaccttcggcggcaacccgctggcggcaaccgtcgctaacgccgtgctggcccatctcgatgcgccgctgctggcgggcgttggcgagcgccatgcgctgatcgttgaccagttgaatgcgatctctgcccgttacgatgcgttcagcgccgtgcgcggcaccggtctgctgatcggcgctgagctggcggggccgctgcgcggcaaggccaaaacgttgaccaacctggcggcggaagaggggctgatcgccctgattgccggcccggacgtgctgcgcttcgcgccggcgctcaatatcccgctggcggatattgcggaagccttcgtgcgccttgatcgcgccgttgcccgcttaacccgctaaccgggaggacggcctgtgatgctatttcgtcccgtacgggaaaacgatctcgacgacatcgtccgcctcgccgcgcgggcgggggtcggcatgacctctttaccgcatgacgtcgggcgcctggcggccaggatccggcgcagtatcgagaccttcgccggcgaactgccgcgcagccagcagggtttcctgtttgtgctggaggacaccgcgctggcgcgggtggtgggggtgagcgccattgaggtcgcagtgggcctggacgagccgttttacaattttcgcattcagaaaacggtgcgcgcctcgaaagcgctgggagtctataagccccaggagctgcttaatctcagctatgaccacaccgggcatagtgagctgtgtacgctgtttctcgacccggcgtatcagcgcaaccgcaatggtctgctgctctccaaggcgcgctttttatttatcgccgcctttcgcgagtggttctccccgcacctgtttgccgaactgcgcggctgcagcgatgagcagggacagtcgccgttctgggatgcgctgggccatcatttcttcgacatcccgttcgccgatgccgaccggctgaccggcaccggcatgaaaacctttattgccgaactgatgccggcgtacccgatctatatctcactgctgccggaagcggcccgcggggtcatcggtcaggtgcatcccaataccgccccggcgcgggcgatcctcgagaaagagggtttcagctggcgcggctcggtggatattttcgatgccggtccggtgctggaggcggacaccgatcagatccgcgccgtgcgcgacagccagcgcctgcctgtccggcagctgatgggcgacctgccggcgccgaccctcgtcgccaacggtcaattcgacaactttcgggcgctgctggtggcccacgaagagcaggtctcgcttgacagcgccgcgctggacgcgctgcaggtcagtgaaaccgaccgcgtttatacggtaaccctgaatccagaggacaacagatcatggcggtaaaagcacagtttatagccgggcagtggctgccaggcagcggcgcaacgatgagcaaactggccccggaggatcagtcgctgctgtggcaggcggccagcgcgggggctgacgacgtccaggcggcctgcgccgcggcgcgcgcggcgttttatccctggtcgcaccggccgctggccgagcgtattgacgtcgtacagcgttttgctgcgctgctggagacgcataaagaggcgctggcgaccctgatttcccgcgagaccagcaagccgctgtgggagacccgcaccgaagtgcaggcgatgatcggcaaggccgcgatctccatcgaagcctatcaccagcggacgggctttcatgagtcgacgctgccggacggtaaagcgctgctgcgccacaaaccgcacggcgtgatggcggtctttggcccctacaacttcccgggccacctgcccaacggacatatcattccggcgctgatcgccgggaacaccattgtgtttaaacccagcgagctgacgccggctaccgctgaaatgaccgtccagctgtggcagcaggcgggcatccccgacggggcgatcaacctgctgcagggcggaaaagccaccggccaggcgctgctggaaaatcgtgatatcgacggcgtgctgttcaccggcagcgcggcggccggtttccacttccatcgctacttcggcggccagccggagaagatgctggccctcgagatgggcggcaacaacgcactgatcgtcgccgacgcggccgatatcgatgcggcgctgcatgtgattatccagtcggcgtttatctctgccgggcagcgctgcacctgcgcgcgccggctgatcgtgccgcgcggcgagcagggggatgcgctgctgcagcggctggtagaggccagcgcgcagatccgcgccggcaagtgggatgatcagccggcgccgtttatgggcggggtgatctctctcgacgctgcgcagaacatgctggcggcgcagcaaaaactggaggggctcggcggcaaggtgctgctgcgcatgcgccagcctgacccgcgctccacggtgctgaccccggggatcgtcgacgtcaccggtattgaggtgccggatgaagagtactttggcccgctgctgacgattatccgttacgacggcttcccggaggcgattcgcctcgccaatcagacccgctatggcctggccgtcgggctgatctccagcgatgcggcgcagtttgatcagctggcggacgaggcgcgagccgggatcgtcaactggaacaagccgctgaccggcgcatcgagtaaagcgccgtttggcggggtgggcgcctccggcaaccatcgcgcggcagcgtggtatgccgccgattactgtgcctggccgatggcctctctggtcagcgatacgctgacgcttccggcgacggtatcgccgggcctgccattctgataacggatcctgtgaggacatatgtctggttttgaagcaaactttgatggcctggtcggcccgacgcaccactacgccggactctccgtcggcaatgaagcctcgcaaaataaccgcgatggtctctctaaccctaaacaggcggcgctgcaggggctgtataaaatgaaagccctggccgatcgcggcttcgtgcagggcattctgccgccgcagccgcggccgaatctgcgtctgctgcgtgaagtgggtttccagggcagcgatgagcaggttatccggcaggcggcccacgcggcgccgcagctgctctccgccttcagctccgcctcgtcgatgtggaccgccaacgcggcgaccgtctcaccgtcggcggacagcgccgatggcaaagtccatttcaccgtcgccaacctgaacaataagctgcaccgtatgcatgaggcgcccaccacctcggcgatccttggcgccacgttcgccgatccgcgctactttgcccaccatgcggcgctgccgcagcatggcgacctcggcgatgaaggggcggccaaccataaccgcttctgccgggaatatgaccggcagggggtgcagtttttcgtctatggtcgacgcgccagcggcggtatcgccccggtgaagtatccggcgcggcagaccctcgaggccagcgaagcggtggcccgcctgcatcagctggatccgcgctacacggtgtttgcccagcaggcgccgcaggctatcgatcgcggcgtgtttcataacgacgtcattgcagtcagcaatcgccatgtgctgtttcaccatcagcaggcgtttgtcgatcaggcggcggtgctgaccacgctgcgggctaaaagcgacagtctggatatcccgttcaccagcgtggaagtgccggacgagcgggtttcgctcgacgacgccgtagcctcttacctgttcaacagccagctgctgagcaaaccagacggcaagatgctgatcgtggtgccggaggagtgccgccagcgggaaaacgtctggcgctatctcagcgatctcgccgccgatagcgcatcgccgatcgatgaagtggcggtctttgacctgcgggaaagcatgcgcaacggcggcggcccggcctgtctgcggctgcgggtggtgctcaacgaggcggagcgccaggcggtcaacgcccatagcctgatgaacgacgaacgttatcagcagctgacggcatgggtggaaaaacactatcgcgaccggctgcatgcccgcgatctggcggacccgcagctgctgcgcgaggtttatcaggcgctggatgagctgacgcagatcctgcgcctgggcgcggtctatgattttcagcgttaaggagcggcagatggagcacctggttaacgatttactgcactgccgcctgcaggcgtggacctttccggcgggcatcgaggcccgctggctgggcgagggcattttacagctgctgccgacggcgccgtggcgccaggcgacgatcctctccgccggcgtgcatggcaatgagaccgcgccgattgaactgctgctgcagctaacccacgatctgagccaggggcggcagccgctcacgcaggcgctgctgatcgtctttggtaatctgccggcgatccgcgccgcgcgccgctatctgcataacgacctgaatcgcctgttcggcggccgccatctggcggtcaccccgggaaatgagtcgcggcgggcttttgcgctggagcaggcggtgcaggctttttatcgcgccgccgatacggcggggccggtcaaccgtggtcatctcgatatgcacaccgccattcgcggatcgctgtatcgccagtttgcgctgctcccggcccacgccggggatttttcgcccgatttctatcagctgctgcaggccagcgggatggacgccgtcgtgcgccataccgaagcgggcggcaccttcacccatttcacctgcgaaaagttcgccgcgcaaagcgccaccctggagctggggaaagtgatgccgttcggcgccaacgatctcagcctgttcgccgccgccgacgcggcgatccgggcctggatcgctgacgcgccgctgccgccgcgcgacaaagcgccggtggactacttcctggtcgaggagagcatcatcaagcgcgagggggaatttacgcttaatctcgcggcagacgttgaaaacttcaccgcgctcccggcagggtatgagatcgcccgccaggcagagaaacgttgggtggtgcaggcccgggccccctatatcctctttcccaacgccggggtcgccaccggccagcgcgccgggctgttgctccgcgccgctgcccttcgtctcccgcaaccagcctgaggaaacaccatgactgaacatcaacatcaggcgtcacctgccgccggaggtgaaggcgcgtcacagcttaagcgcgggctcagcgcccgccatatccagatgattgccctcgggggcgccatcggcaccgggctgtttatgggggcggggcgcaacatcgccgtcgccggcacctcgatcctggttatctatgtgctggtcgggttctttacctatatggtgatgcgggcgatgggcgagctgctgctcacccgccatgactaccgctcgtttgccgactttgtcggcgagtatctcgggccgcaggccagcttttacctcggctggacctactggctaagctgggtggtgacctgtatcgccgacgtagtggtctgcgggagctatatgcagtactggttcccggaactgtcggcgtggatgccggccctcagcatgctggcgattctgttcctgcttaacctgctgtcggtgaaaatgttcggcgaggcggagttctggttcgccctgatcaaggtgatcaccattatcgccctgatcggcaccggcggctggatgattgccaccggctggacctccccggacggcgtgacggcctccctcagccatctcaccgacccgacggcctttatgccccacggcatcaccggctttttcgccggcttccagatagcgatcttctcctttaccggcattgagctgctgggcaccatgacggcggagacccgcgatccgcagcgcattttgcccaaggcgatcaatgctctgccgctgcggattatcatcttctatctgctgtcgatggtggtgatcatcgctgtcgcctcgtggccgggggtgtcggcggagaccagccccttcgtgacgctgttcgccaaggccgggctgcctgccgccgcggcggtgattaactttgtggcgctgacctcggcgatgtcctcggccaacagcggggtcttctccagcacccgcatgctgtacggcctgtcggtggagaagcatgcgcactggcagtttcgtatcctgtcgcgcagtacccgcattccggtgcgcagcctgctgttctcctgcttctgcatgctgatcggcacgctgttgctgtttctggtgccgaacgtgatgaccctgttcaccatcgtctcgaccctggcggcgattatggtggtgttcagctgggggatgatcctcgtggcctatctggtttaccgccgtcagcgtccggacctgcacgccgggtcgatctttaagatgcccgccggggtggtgatgagctgggtgagcctgctgttcttcgcgttcgctatcttcatcatgatctttgacccggacacgctgctggcgctgttggcttctccgctgtggtttatcgcgctgtggggcttctggaagctgaagcagcggcgcgaggggcagcttcagctggacaaccagagcgcctgacacccgccggtcctggcggccggctaagcaggggggaagacttgacgcctgtttgtgcccggtggcggctggcgccttaccgggcccatgcttaccggacctgggataagcggtttcccccgcggcgcgatccccccaggcccgcgcaagcgcagcgccgccgggcgggatagtcggcgccgtagtagccctggcgggcggcggtcaggcgctttccgcccgggagggggccgtgcccagcgcggacttcatccggctggcgcagaatatcgccagcagcgaaatcgccaccgtaacgcccagataaatggccaccggccgccagtcaccgtcatatttcgccagcagaccggtggcgataagcggcgcggtgcccccggccagcgcggcgcccagctggtagccgagggtgatcccggtatagcgcacattggcgctgaaaatctcagagcacagggtgccgagcaccgcggttaccggcgcccacaggatgccgaaggcaacgatcgtcgccagcatgatgccccagccggtgccggtgtcgagcagcaggaaccacgggacgataaacagccccagcagcaccacgctcagggtgtacatcttttgccgacccaccttgtctgacagcagccccatcagcgggatcatcacggtggccaccagcgcgcccagggtcacggattccagcgcctgcgacttctgatagctcagggtggtggtggcgtagctgaccacaaaggtggagaagatatagaagggggcggtctccaccactttcaggccggcggcgatcagcacttcccgccagtggtgcttgagcgtatcgcgcagcggggccttcgccacctggccggattttttcacctgcttaaaggcgggcgtttcgtcgatatctttgcggatccacaggccgagaaaaacgaggacggagctgagcaggaacggtatgcgccagccccaggcgagaaactgcgcctcatcgaacagcgtcatcagcgagacgataaatgttgccatcaacatgccgatggtcaccccggcctggggaatgctgccgaaaaagcctttccgcttttccggcgcgtattcataggccagcagcgcgccgccccattcgccgccgatacccatgccctgaataatgcgcagagtaatcagcagggccggcgcccagaggcccaccatctcgtaggtgggcagcaggccgatcgccaccgttgcgctgcccatcagcgacagggtcagcaccagcgtcttcttgcggccgatgcgatcgccgatatgggcgaaaatcacgccgccgatggggcggataaaaaacgtcagcgagaaggagagccaggagaggatcaggccgataaccgggtcgaccatcggaaagaagattttgttgaacaccagcgcggcggcggtgccatagagaaaataatcgaaccattcgatggcgctgcctgtcaggctcgcgatcagtaccttcttgtttttctgcagaatggatgcagtgttgtcttgtggattgctcattacgaaacgttctcccgccacggtaaataggtcaggtgtcactctgtgtaaacagggtgcaacctggtgtgaaaaaggttgtgtaattgttaagcaacttagggttgaaggttacaattggcaagttcatcgctggcaaactgggcgacatggcgaggtttggcgtggtgtaaccgcgacgctattttttattttccacctgattttgctgttttttgttattttcatagtgagttgttcaggtgcaacccgcctgtttttagatgtttcttgttatttcaaaatggttacaaattaacgccgctttgcctcccgcgaggcggcgtttatgatggcgaaagcatcctctccgatcggctgagagggaattaaggagacagaatggcagaacaatttccccggctgtcggcggcgacgctggcggcggctaaccaggtcggcgcctggctggcgcaggacgatctggcgatgctacccgcgctgccgcaggtggacgtggtggtgctggccggcaacgccgtgatcccgaccatcgacgccgcctgccggctggcggcggaacgggaagtcccgctgctgatcagcggcggcgtgggacattctacgaactatctctacgaggcggtgcgccaggatacccgttaccgtatgttgccggtggtggggcgtccggaagcgcatgttctggccgatattgctcatgactactggcaaattccgcgctcgcggctggtggtggaggaccagtcgaccaactgcggcgagaacgcccgttttacccggaccacgctggagaacggggggatccctcatcgtcgcgggatcgtcattcaggaccccaccatgcagcggcgaaccatggccaccttcgcccgcgtctggcagggggtgacgacgccgccacagtggctgagctttcccggctgctcgccggtgctggagcagaccgatggtcaactggggttcgcgggcggcggggcggggctgtggccggtcgcccgctacctggcgctgctgctgggcgagctgccgcgcctgcaggatacgcctgaaggatacggtccgcgggggaaagacttcatcagccacgtcaccttcccgccggagatcatcgatgcctggcgacagctgcgggaggacgcccagcttgccggggcgctgcaggcccgcaccctcggctgaaaactgcccgtttgcggcagatttatcgcaaacgggcaatttgtgttattggaatgtaacctcaagcgggcatttttggcccggttttatgaatcagctcacagaacagcgtcaatgtgctgccgaacagcggcttatccgcccgatatttaacaaaaaaatcacctgttaaatacaaatgcaccacaggagcagccatgacagcacccgttcaacacccgatgtatattgatggccagttcgtttccggtcgcggcgacggctggatcgacgtgcttaacccggcgaccgaagcgctgctgtcgcggatcccggacgggactgccgaagaggcgcggctggcgattgacgccgccgagcgcgcccagcccggctgggaagcgctgccggccattgagcgtgcgggctggctgcgcaaaattgccgccggtatccgccagcgtgccgacgagatcgccgggctgattgtcgctgaaggcggcaagatccagcagctggcggcggtggaggttgcgttcaccgcggactatctcgactatatggcagaatgggcgcgccgttacgaaggtgagatcgtgcagagcgatcgcccgggggagaatatccttgtctttaaacgcgcgctgggggtgaccaccgggatcctgccgtggaacttcccgttctttcttatcgcccgcaagctggcgccggctctcatcactggaaataccattgtcattaagcccagcgaatttacgcccaataatgccatcgcctttgccgagattgtccatcaggttgggttgccgaaaggggtctttaaccttgtgcttggccgcggagaaaccgttggccaggagctggccggcaatccgaaggtggcgatggtcagcatgaccggcagcgtggcggcgggagaaaaaattatggccgctgcggcgaaaaatatcaccaaagtgtgcctcgagctcggcggcaaagcgcctgccattgtgatggacgatgcggatctggagctggcggtgaaagcggtggtggactcgcgggtgattaacaccgggcaggtgtgtaactgcgtcgagcgggtctatgttcagcagggcatttacgaccgcttcgtcaaccgcctcggcgaggcgatgaaggccgtgcagtttggcgacccggcgacgcgggatgacatcgcgatggggccgctgatcaacgcggcggcgcgggaccaggtggcgggcaaagtggcgaaggcggtggcgcagggggcgcgggtggcgctgggcggtcagccgctggagggcaaaggctatttttatccgccgaccctgctgctggatgtacgtcaggagatggacattatccatgaggaaaccttcggtccggtgctgccggtggtggccttttcgaccctcgatgaggcgctggcgatggccaatgacagcgattatggcctgacctcctcaatctatacccgcgatctgaacgtggcgatgaaagcgattaagggactgaagtttggcgaaacctacatcaaccgtgagaactttgaggcgatgcaggggttccacgccggctggcgtaagtcggggatcggcggggcagatggccgccacggcctgaatgagtacctgcagacccaggtggtctatctgcaggcctgaggcactccacacagaaccggcggacagcgcaggctgtccgccgttcacttagcgggcaaatttctccagcacgcggatcagttgggtgacaaagccgtattcgttatcgtaccaggcgacggttttcaccagctgtacgccgccggcctccacaatctccagctgggtagcatcgtagatcgaaccgaaatggctgccgatgatatcggaagagacgatctcctcttcggtgtaaccaaaggattcattgccctcagccgcctgcctcatcgcctgattgacctcatccgcagtcacctttttctccagcaccgataccagctccgtcactgagccggttttggtcggtacgcgctgggcatggcctttcagcttaccgctcagggcagggatcaccaggccaatggcttttgccgcgccggtagtgtgcgggataacgttttccgccgccgccctggaggcgcgcagatcttttccgcgcggcccgtccaccagcgactgggtgccggtataggcgtggatggtggtcatggtgcctacggtgatgccgaaggcatcctgcagaactttggccatcggcgccaggcagttggtggtgcaggaggccacggagatgatggtgtcatccggggtcagggtgtcatcgttgacgttgtagacgatggttttcatctcgccggcgggggcggaaatcagcactttgcgcgcgccggcctggagatgggcttgcgatttctcggccgaggtgtagaacccggtacactccacaatcacctcggcgcctgccgcctgccatggaatatgctgcgcctctttttcggcatacaccgtaatggttttgccgttgacgatcagcgcatcttcggtaaagtcgacgctccacgggaaggggccgtagtttgaatcatgcttcaacaggtaggccagcacctttggcgaagtgaggtcgttgatagccaccacttccaggctgctgtcgacttctaataaacgacgtaacaccagacgtccgatacgaccaaatccattaatcccaagtttactcatggatattctccggttggtaaaacgactcgatgtgatgaaactcctccaggcttagccctgtccccctgattggtcaactgacaatctgtgcgctatgccagggcctgcgggccggagaggggaaaagtgaatgttttcccggtcttttttgcccgtgacggcagggaatgatttttgttaccagagatgagggggctgcctgctggcgaaacgacgaaaagcgtctatgcttaactattgaatagcttagtaaaaaattgacgttagacgaagggagaggttatgggattctggagaatcgttttcactatcattctgccgccgctgggtgtgctgctgggaaaaggcttcggctgggcgtttattctcaatatcattttgaccctgctgggctatattcctggcctgatccacgccttttgggtgcagacccgcgattaaaggctgaccctcgccgcctccccctgagaccggttcaggggggcatcaggcactctttatataacagcgtattatccttcgaccagtagtgccgggtctcctcttccagatcgacgatccacttaaacaccccggcgctggcgagatcccggcagtactgttcaaagttaatggcccgggcaaagtggcggataacggcggccctggtcagacaatggctggcctcagcgcgaacgcgcagcagcccgcgggcgctttttaccgagaccacctcgtcgtttgccattacgaaattcatattgccggtggaaacaaaatagatgtagtaggagaccttatgccgacgcagttcattggcgaaggtggcatagtcggcgtcagaacgcgcttgctcaaaaaaatgacccagcctgaccagcagttccatttcgatccttatcgtgtcgctgtgtgcggctttggccgatagcggcagaaaccattcactaaataacttattcgcattttaataatataggtgcgttatattaatggttattgcgtaactggaacacggtttcaagtgttacaatctattgcaatcgtttggctacctggtcagcgatgcgtaagcgaacggcgaggcgggaacgaggagacaagcgccggcggggaaggccgccggcgggaaaacggcgctacttctgaatcaaatagcgaatggttgggccatcctgttgaatatccagcaccgtgtagccgtggttccttgcatcaagcggaatgttattgatcgactgcggacagtcgctgaccacttctaggatctcgcctttttgcagggaaggcattgcctccagggtagcgaccgccggatacgggcagggttcgccgaccatatccaggcgataatcagggatgatgtttttcatgcgctctccttcacggtccggaccgccgcctggcggcggaaaaaatgtctctcccaggcgatcaccagcagcagggcgatcagcagcagtagataggtggccagtagtccgccaaagggaccgaaggcgttcagcaggttgactttctgccagtgggtggcgaggggggcggcgatatcgtcccagcaccaggcgagcagcgttgagccgatgacgttgcccagcccaacccaccagtagtgaacctggccctccaccgcccggtacatccagccggtctcacagccgccggccagcacgatgccaaagccaaatagtagcccgccaatcgccgcattaggaccggcccacataattttcggcgccatccccaattgcacatagctgaagataccgatggcgctcgccgccatgccgaagataatcgccttcgccatcaccgtccggccggtgatccacatatcgcgaaaggcggaggtaaagcagatctgcgcgcgctcgataagcagaccaaagccaataccgaacagcatcgccaggcccagcgccgggtggtctgcggcggtaagcaggccccagccgatcatggcgaaaaagaccaccatccccaggcggaagcggcggcgcgcctgctgcggtttttgggttaacggcgaggcggcggacactttttgcatttttaccgggatgcgaaaaaggggcagcagcgtgaagcgggcgccaaaccaggagccgatggcggtggcgatggcaaacagccaggcgtgcagggagaactgcggaatgccggtgaagaaggccgccaggttgcagcccatcgccagccgtgcgccgaacccggcgatgatgccgcccgccacggcctgcgcaatgcggatccggctgcgtggcaagcgcagtttgacgttattcgcccacagcgcggcggccaggcagccgccgaacatgccgatgatcatcctgccatcgatgcgggtcagcggcgacccttcgagatgtatcagctggtaatagccccactgttcgctgtggacgcccagcagctgcagcagctgaccaccccagcgggtgaattcgccggtcaccgcccagaaggtgccggtgatgccaaaatagtaggtagagagaatgcccgcggcaatgaccgccgggacaggagaccagaaccggataagccaggcctgtttgaaggattgccatgtcataaaaatgcctctgaactcagaaggtattaacggtcgatgaccgaccaaagggggcaaatagtacccgccttagcgcctgctttctctgttttggatcaagcccctacgcttgcgtcagcacggcaaccagcgccagcagcgcgggcagcgcctgaatatagagaattttgcggctggcggtcagcgcgccgaaaatcccggcggccagcacgcaggccaggaaaaagataaccacctgcacacccggcgcccccagccacagcccccatgccaggccggcggccagaaagccgttatacaagccctggttggccgccagcacccgggtctgccgggcgaaatcggcgctgaggttaaaggcccggcgcccggcgggggcttcccagagaaacatctccagcaccaggatggcgagatgaataatagcgaccagcgcaacgaggagagtggctaacacagcggtccttaacgattaggggaatgtttctcaagtataaccgcaggcgctcaccaggcgagaggacgactgctatagtgcagatagcgtcatattttcccgccgcgaagagcgtcggtttatctgattgccccttggtttagctaagcggtgctagcatgccgggttctttttacgggtatggcataggttactgaatggtaaataaattatggattttgttatcagggctactaatggttgccatgccgtcggcgcaggccggggaattaagcctctactcgatgaataccggttcctatgtctatcatatgacgggtaaccacggacaatataacgaacatttcaataacaactttttctcggtggagcgcaagttttctcaggattcaaaatacagcgtgctggtcggaacgatgaaaaacagctttgacgatcgttgcctgaccctcggcgtgcgccgcgactggctgaaaaacgataccggctgggtactgaaaggggtgtatgcctataccggggaatttttctttgatgccttcagccactgtggggattccggcacctaccgcaccgccaaaaaaatcaccggcatcggtttttcgccctacctctatcatggcctgcaatataatttcaccgattatttcggtgtggaaggcggcattattgtgccggcgatctttgtgatgagtgttcagtggagctttcgctagacgctttatttcccgggaaaagagcaggccaccacaggtggcctgatactaacgacctggcggcgggaattaatggaagccgagacggatcagatccaacgggcagaagcggccctcgcagccgtcgatttcaacgcagtccgcccggcgcaactgctcagcggttttcccctcgccatggatagctttaatcacgcccgtcgtcccgttaccggcgatcattaccatgctgccggtagcaatagcgttacgattacggtcataggttttcatggtctcctcctcaataaacctgggtgaaagcaatgattaagcgcgcaaattaataccgctttctgcctaaaaaagttttgaggataatcaaatttattttaataaccacctgagcataaaggcaagaagaccttctgttcgcttccatcgcatcgcctgcgcggcgaggggatgaagcgtgatactggccgtcatatgtcagccaggttactgttttatgaccagattattaaccttgccagcccgcggaaaatagcgaaagatggcactattcgggcatcaacggtgccagtgcctgtcctgagggagccatgaatcaagacgtcaccgcgaagatgttaaagcccgattttgatagtgaagtttccggcctggtgcatggctatttgtttcatgaacagcgccccccgcagccgatcgcctctggcgaggtctgcgcccgctatcaggcgctcgccgatgacaaggcgtttatctggttacacctgaatcttaatcatgccaccgccgagaaatggttaaccagccactttccggtggccgattttttcttcgaggagatccgcagcggctcgcacaccacccgcattgagcgacagggggaaaatctgttcgctgtgcttaacgatgtgctgtttcgtccgcaggataccagcgcggaaaccgccacgctgtggctctactgtagccccaggctggtggtgacggcgcgcttcaaaccgttgcggtttatcgaatggatgctgccgcgcttgcagacgctcagggtgaacacgtctactgagctgctggcctttctgctggaggagcaggaggaggtgctggagcaggtcgtccgccaggccagccgccatgttgaccttattgaagagcgtcttctgagcaatcacgtgcagcgcaaccgggccgatctggcgcggctacggcggatgcttttacgcttccagcggttgctggcgccggagccggcggcgatgttccggctgcttaaccggccgccggcgtggatggatcgcgcggtggtgcaggcgtttcgtcagttcaccgaagagtttagcgtggtgcttaacgatctgtcgggcctgatcgagcgcatcagtctgctgcaggaggagattggcgcccgccagctggagcagagcaatcgcaccctctataccctgacggtgatcaccgtcctcgcgctgccgattaacatcgtcgccggtttcttcggcatgaacgtcggtgggatcccgctggcaagcaaccaccacgggtttatcctgctggtggtgattgtcgctgtctttaccctcggcgccggttacctggcgtttcgccggcgcgatgacctgtagattgcgcgtcgaatcagctgaggctgcgcagggcggcaatcagtccttcgacaccgcgttccagcttctcgcgcgggcagccgacgttgagacgcagaaagccgttgccctcaggaccataggtataacccggcataatcgccaccttctgttcggcgatcagcgcctgctgtagcgcgcgatcgtcaacgttgagcgggcgcaggtcgatccatgccaggtaggtggcctccggcggctgccagcagagcgcggggaaggcgttgttgagcgtgtcggcgacatagcgcatattcgcctgcaggtagtcgcgcagggcatcgagccagggagccccgtcgcggtaggcggcgatatgggcgaccagcgccggcacggaaggggaagagagcccgtcgcgaccctttagcgcctgcaggtagctgtcgcgctcgttctcttcgggcataaagccgtaggccccggtaaaggccggaatattgaagctcttcgaaccggaggtgaacagcgcccatggtccctgagcgacctcgctccacgggatatggcggtgttcgccccaggtcatgtccatatgaatttcgtcgctaatcaccctgacgccatgtttttgacacagggccgccatggtctccagctcctcgcgacgccagactttccccgttgggttgtgcgggctgcacagcagcagcagggtattctttggctccgccagcgccgcctccaggcggtccatatcgcagcgccaccgattatccttcaggatcaatggcaccggggcaatccgccgccggttagcggtgatggtgttatagaacgcatcgtaggcaggggtgtggaccacgacgccgtcgccttctttcgaccactggcggatggtttccgccaccatatagataaccgagggtccgtagaccacagattgcggatcgatgtcgctgttaaagcggctggcgtaccagtgggcaatcgccccgagaaacgcctcgttgcgccagcggctgtagccgaacaccccgtgggccagccgctggctaacggcgtcgagaatacagggcgcggtggcgaaatccatatcggaaatagtgaacggcagcagatcggcggcgccaaaccggtcggcgacatagtcccattgcgtgcaccaggtgccgtggcgatcgataggggtggcaaaatcaaacattggagcttccttagcgagcgccccctccgtagcggagggggactagtgggatcaggcctgcacggtattcatcagcgtggccatctcatcttttaccgactgtacctgcgggccaataaccacctgcagattatgctggttgagctgtaccaccccgatggcgcgatgggctttcagcgcggcggcgtccactttgctcatatcgtgcaccgacaggcgcagacgggtaatgcagttatccagcgaaacaatgttctctgcgccgccgagcgccgccagaatcgccggtacgttatacccggatttgccgatggtaccggcgacggctttctccacgctggcggcagtgtcgatgtcgcggcccggcgttttcagattgaagcgggtgatggcgaagcggaagatggcatagtagaccgcgaaccagatagccgccaccaccggcaccagataccacttggtggccaggccatgcagaatgccaaacaccacgaagtcgatgatattgccgtcggtgttgccgatggttaccccgagcaccgccatgatggtaaagccgagaccggtcagcagcgcgtggatgacatacaggaccggcgcgacaaacaagaacaagaactccagcggctcggtggtgccgccgaccacgcaggcgatgaccccggagatcagcaggcctttaattttatgtcggttttccggacgggcgcagtggtacatcgccagcgcggctcccggcaggccgccgaggaatgccggcattttaccctgcgacaggaaacgggtggcgctttcggcgaagccgtgggtcgtcggacagctcagctgcgcctggaagatggtcagcgcgccgctgacgctgtggccgcagacgtcgagggtgccgccggcttcggtaaagcggatcagcgccaccagaatatggtgcaggccaaacggcagcagcagtcgctcgccggtgccgaagatcatcggcccaaaatccccggcgctgttgatcatcttcccgagggcgttgatccccatggcgaagactggccacaccagcgggatcgccagcccgaccagccccagcaccacggtggtgacgatcggcacgaagcgggtgccgccgaagaaggccagggcgtccggcaggcgaatgttatggaagcgttcatgcagcagccagacgataattccggcgatcaccgccccgaggatcccggtatcgattgacggaatgccgataatgttctggatattgttggccttcaggatcgcggcgtcggtggtgggcagaatacccttcgcggtcagccagaagttgaccgccaggttcatgaccgcgtagccaacgaagccggcgaaggcggcgacgcctttgttctctcgcgccagacccagcgggatggcgatacagaacatgaccggcaggaagctgaaggcaaaggagccgaccttgctcatccagataaagatggcctgcagcagcggcatatccagccacggcagcagagtcaaaacgtcgtgactgcttagcgagctgccgatccccaacatgatcccgcaaaacgagagcaacgctacgggcagcatgaaggtttttcccagctgctggaaaaattcccataaggtgatttttggtgctgttttcgccgtcatagcacggttcctgattcataagtggtcgggagaactaacgccacggcaagataaaacgttttatcactttttagtgcgataaaaatcacatattcaagcgataataaggtttataaagatcgcacaatgataaaacgatttatcgacaggcaagggagtcagccagcaggttatggcaatcgcaaaaaagatcaccatcaatgatgtggcgctggctgccggcgtctccgtgagcaccgtttcgctggtgctgagcggcaaagggcgcatctccagcgccaccggcgagcgggttaatcaggctatcgaacagctgggatttgtgcgcaatcgtcaggcggcctcgctgcgcggtgggcagagcggcgtgattggccttatcgtcagcgacctgtcaaaaccgttttatgctgaattaaccgccggcctcaccgatgccctggagaggcaggggaaaatggtatttctcacccagggaggccgcagcggcgaaaagatggcccagcggtttgatacgctggcggcgcagggggtggacggggtgattatcgccggggcgatcgaccgcgggagcgagctgcgcgagcgtgcggcggaggcgggggtgccgctggtgtttgcttcccgcgccagctatcttgacgatgtcgacctgatccgcccggacaacatgcaggcggcgcagctggtgacggagcatcttatccgccgcggccatcagcggatcgcctggctcggcgggcagagtgcttcgctgacgcgcgccgagcgggtcggcggctattgcgccaccttgctgaaatacggcctgccgtttcacagcgaatgggtgctggagtgcgagtccagtcagaagcaggcggcggaggcgatgaccggcctgctgcgccagaatccgaccatcaccgcggtgctgtgctacaacaacgtggtagccaccggcgcgtggttcggtctgttacgggctggaagacagagcggggaagatggcgtcgagagctactttgagcagcgggtggcgctggcggcgtttgccgacgtgccggaggccgccctcgacgacctgcctctcacctgggtgaccaccccggcgcgggagatggggaaaagcctggcggattcgatgctgcggcggctggaagaggggactggcgagacgcgaaaccagattatgcccccgcggctggtgacgcgaaaatgagggagacggcgcgcgctggccgtctcctgtaccgataagttacggctgcggggcggcgtcgtcctgctgaggagcggcgtcatcctgctgcggctggccttcctgcggcgcgctgtccggcagcgaaggcgcttccagaccaaacatcgcggcaaaatcttgcagcggcattttctgtccgttcagcgtcacctggccgttcgcgtactgcagactgctgctgatggcgttatcttccatggtggtaatgcggaacatctggcccatcgccgccaggcctttgacctgctgatcggcaagcttggcggcatcggccggctgatagccttccagaccggcgatcttagtcataaactccgtcgccatatccaccgggatcaccactttgccgtccagggactgcaccacgcgatccaggctttccgccagggtctgcggcggagcggtcacctgggccggatctttcaacagaaccgagaggttgagggtgctttcgcctttggcattgcgccagctcagcggagagatggtcaccgacgggttgcctttgagcaggatcggcagcgcattgaacagcgtttcggtgagggcctgctgatacagctccggattctgcgccagctccggtttcgccagcagcgcctgagactgcgcgctgtactgctgactgaactggtgccacgcctgaccgtcgacgttatccactttcagtgtgagtttgccgctgcccatatcctgcccctgcagcttgaggctgttgacggtgtagttcacctggctgttcacgcctttgccgtcctgggtcagcgtcgagccgccgtccagcgccatgccgtcgatcagcgccagctctttgccttcgacgctgatggccagtttatcgagggtcattttttgctggccgatacgttcgttgaagctggccagctcggtggcgccgtcggtggtcaggttgacgaagcgcagctgtaccttctgattatattcattgagcgcatcgatctgcccgctgccggcctggcccttcaggctgatgtttttgccgtcgcggtcggcgtcgagctggaactgaccgccgctgaaggtgactttctcatcgcctttagcgtagtcgagggcgttaaggacgatagccgactggctgtcgccgctgtaggcaatgcgcgtatcgacggtaaagggggtgtcgcctttggctatctcgaacagcgcctggctggcgtcgtttttcaccagcgtggtgtggacggaagccattgccggcgccagattaaaggcttttaacgaggccagcgggaaggggccatgatcgaccacttcgtcaagcaccacgctctgaccggcggccagccagccgttagcctgaccggcgatcggcttcaccaccagctgcagatggctgctgaacagcccgcgctggtagtcctgatagctcagctccagacctgactccggcgcgctgctgcgcagctgggcgtttgcctgctgcaccatatcggcgatccggccttccagctgtttaccggtgaaccaggcgccgcctgtccataccacgcccagcgccacgatgactcctgctgcgaccagcgattttttcatagcatttatccataaatgaagccaggcggagagaccgcctggctgagttatcaccaacagtaagcgcgacctgaagggtcagtcgcttactggagcttattgaaaacgcgcgccacgcggccgcggccgctgacctgcaccggcgattcactggcggccacgaaggccgactcgcccggcttgagggtcaggctctggtcgcctttgcgcagtacggcttcgccgtcgacgcagaacacgatcgccgcgcttgcctgggccagatcgctggcctcggcggagaggtcatgcagggagaaggcaaaatcttccaccgggatcgggaagtcgagttccgcgccgtgacgctgcggctgggtcaacagctcacccgccggtttagcctcgaacttgacgttagcaaccagctcaggaatatcaatgtatttcggcgtcaggccggcgcgcagtacgttatccgagttggccatcacctccagcgccaccccctgcagataggcgtgcggcgtttcagcaaacaggaacatcgcttcgcctgggttcagcttcaccacgttcagcagcagcggggagaagaggccgctgtcgtccggatagaattccgcgatcaggcggatagtctgccacggttcgccttgttcacgggccagtacgtcgcgcagcacctgcagcgccttggccttttcctcaccctgcatatttagcaggctggcaaacagctggctcaggtgagtcgcgtccggctgctgcaggaaggcgccgattgccggatgcgcgctagccaccggctgcagcagggtgacaatctcgctgaactcgcgaaatgcattcatcgccaggaacggcgtcagggcaaaaaccagctccggtttgtggttcggatctttgtagttacgctcggcggcggagagcgggataccggcggcgttctcgcgggcgaaaccttcttccgaggcctgcttgttgggatgcacctgaattgagagcggctgagcggcgcacagtaccttaaacaggaacggcagttcaccaaagcgggcggcaaccttgtcgccgagcagagcggctttatccgcgtcaatcacctcgcgcagcgaacgcggctggccgtcggccgccaggatctgcgaactgctcttcggatgcgcccccatccacagctctgccatcggcagattgtccgggttggcgatgccatagagttcggttaaggcggtgtggcttccccatgcatagttctgcacggcgttaatcagcttttgcattctcaatccctgtttcaaacaaagtaaattttatcgccctattaaaccagcaaacggtggagaagcaactgctgaaagaaaaagtcgtccttgtctcagtttttgttaaaaaattgtgtaagattgttcgactcgcttttctacaggcacatggagtccctgcctgaaacataatcagccaaagcagtaagtgagagtacaatgtcgaataaaccgtttgtttaccaggatccttttccgctcaaaaaggatgacaccgagtattatctcctcagcagtgattacgtctccgtcgccgaattcgccggccaggaagtgctaaaagttgaccctcaggcgctgacccttctggcgcagcatgctttccacgacgcctcctttatgcttcgccctgcgcatcagcagcaggtggcggatatccttaacgatccggaagccagcgaaaacgataaatacgtcgcgctgcagttcctgcgcaactcggatatcgccgccaaaggtattctgcctacctgccaggacaccggcaccgcgatcatcatgggtaaaaaaggccagcgcgtgtggaccggcggcggcgatgaagccgccctggcgcagggggtgtacaacacctatatccaggacaacctgcgctactcgcagaacgcgccgctggatatgtataaagaggttaacactggcaccaacctgccggcgcagatcgatctctatgctaccgatggcgatgagtacaaattcctctgcatcgccaagggcggcggctcggcgaacaaaacctatctgtaccaggaaaccaaagcgctgatcaccccggcgaagctgaaaaattacctcgtcgagaagatgcgcaccctcggtactgccgcctgtccaccgtaccatatcgccttcgtgatcggcggtacctcggcggaagcgacgctgaagaccgtgaagctggcgtccaccaaatactacgatggcctgccgaccgaaggtaacgagcacggccaggcgttccgcgacgtgcagctggagcaggagctgctgctggaggcgcagaaccttggtctcggcgcgcagttcggcgggaaatactttgcccacgatatccgcgtgatccgtctgccgcgtcacggcgcttcctgcccggtagggatgggggtttcctgttccgccgaccgcaacatcaaagccaagattaaccgcgacggcatctggatcgagaagctggagagcaacccggggaaatatatccctgagcatctgcgccaggccggggaaggcgaagcggtgaaggtaaatcttaaccagccgatgagcgagatcctggcgcagctgtcgcaatatccggtgtccacccgcctgtcgctgagcgggactatcatcgtcgcccgcgatatcgcccacgctaagctgaaggagcttatcgacaacggcgaggcgctgccgcagtacgtcaaagatcacccgatctactacgcaggtccggccaagacgccggacggttacgcctccggctctctggggccgaccaccgcaggccgcatggactcttacgttgatctgctgcagtcccatggggcgagcaagatcatgctggcgaaaggcaaccgcagccagcaggtcaccgacgcctgccacaaacacggcggcttctacctcggcagcatcggcggcccggcggcagtgctggcccagcagagcatcaagagcctcgagtgcgtggcctatccggagctgggtatggaggctatctggaaaattgaagtggaggatttcccggcctttatcctcgttgatgataaaggcaatgacttcttccagcagatccagacctcgcagtgcgcccgctgcgtgaagtaacccacgccgcccttcggggcggcgctggtcgatgacaaacctgatttcgttagggtgagcgcctttctgccgggcggcggctttcgccttacccggcctacgaaagacagcaatatcaataagttatgcagttctctgtaggcccgcgcaagcgtagcgccgccgggcaatcccgacgattgcattttgtcagcggtctgggccgcccctcggggcggctttttttatgtcgcttcgcggcacgaaccaccaaaacaacttatcaatctggccaatacttagtcttttaagcaggtgagctttgtcgctatgacgcacttttcatccaaggagaaagtaatgacaacgcatcgcagtgaaaaagactcgatgggcgccatcgaggtcccggccgataaactctggggcgcccagacccagcgctcgctggagcatttccgcatctcgaccgaaaaaatgcccggggagctgatatacgccctggcgctgaccaagcgggcggcggcgaaggttaaccaggatctcggactgttgacggcggagaaagccggggcgatcgtcgccgccgctgacgaagtgctggccggaaagcacgcgcaggagttccccctggctatctggcagaccggctccggcacccaaagcaatatgaatatgaacgaggtgctggccaaccgcgccagtgaactgctcggcggagaacgggggatggcgcgaaaaattcatcccaatgacgatgtgaataagagccagagctcaaatgatgtattccccaccgccatgcacgtcgcggcgctgattgccctgcgggaaaaagtgatcccgtcgctgcaggcgctgcgggcgacgctcaatgaaaaagcggtggccttcagggatatcgtcaagatcggccgcacccatctgcaggacgccacgccgctcaccttaggccaggagatctccggctgggtggcgatgctggaccatagcctgaagcacattgaagccagtcagccgcatcttgccgagctggcgctgggcgggacggcggtaggaaccgggctgaatacccatccggaatatgccgtacgggtggcggccgagctggcgtcgctcagcggacagccatttgtcaccgcgccgaacaaattcgaagcgctggccactgtggatgccctggtccatgcccacggcgcgctgaaaggcctggcggcctcgctgatgaaaatcgctaacgatgtccgctggctggcctccggcccccgctgcggcattggtgaaatcgccatcccggaaaacgagccagggtcatcgattatgccgggcaaggttaacccaacccagtgcgaagctctgaccatggtctgctgccaggtgatgggcaacgacgtggcggtgaatatcggcggtgcttccggcaactttgagcttaacgtctatcgcccgatggtcatccacaacttcctgcagtcggtgcgtctgctggcggacggtatggcgagctttaacgagcactgtgcggtgggtattgaaccgaatcgcgagcggatcagtcagttgctcaatgagtcgctaatgctggttactgcgctgaatacccatatcggctacgacaaggcggcggaaatcgctaaaaaagcgcaccatgaggggctgactctcaaagcctcggcgctggcgctgggctacctgacggaagccgaattcgacagctgggtgcgcccggaagagatggtcggcagcctggctattcgctagccagccagaggtgcaggcgcgggataagcaatctcagcgactgcgcctccggtttgtagcgatactgcacattgtcggcatcatagttcagcagctcgccaatatccggtacgctgaccccccggctgccggacatcagggcgatcagcgggctggggcaggcgtactgtacctgtttctgctcgccggcgtaccagacgcgggcgatcggctggactttcaccggtcgttttattttcagccgcgcccgctgcggcagggcggcgatatcctgatactccctttccagtttgctctgccactgctcccgggtccacggcggcaccgcccgcggcgcttgcaggcttttctccagcatcatcaacacctggtcgcgggtcagattcttgatgacgtgcttattggcccagccgaagcggatggtgctcgggtcgacgaggggcgtcagcgtgcggtaggcgcttagggtgatcaaccccggcaaatgacggtgtacccactcaaaacgggcggtggggggcaggccggagtcgacggtgacgatcttctcgaaggtggccttcagggcattgatatgctgaatacgcgccagcagatcctgctgctccgcggcggtaacctgcaggcagatagcccccggcaggcgtacggcggccttgctgctgcggttttccgattgctgctggataaacagatggctgtagtggcgcagggcgcgcgccagggccgtcttgccgatgtgctgcaccaccggaatagtggccatcggatcgtgctcggcatccttaccgatcgccggcagttcaaatacccggcccgccagcagacggcagtcacttaacgcctgctggagcgcctgcagctccagctcgatctggcgaaaggtattattcagacgttcaacgaggtcgtagctggccattattaccaccttagttacaacatactattagatttttgcagcatacccagcccgcggcttctgcgcaagttttattcaggcagaggtgaaatcaggcagctgatgatagaccggccagctaaagcagaagcgggcgccgccgagagggctggcctcgcagcgcacctcgccgcccatcgcctgggcgatactgtggacaatcgccaggccgaggccgcagcctcctgtcgcccggtcccggctggggtcaaggcggacaaaaggctcaaacacccgctcgcgctcctcgggggcgattcccgggccgtcatcctcaaccagcaacgaagcgcgcgaaccctgcagcgtcaggctgaccgccacccgctggctgctgtagcgcagggcgttattgaccaaattatccagcacccgctccatcagtcgcatatccagcgcgccgtagttaccgtgggtcagcgtcgccagggcgacctcgcgctgtgggttaaccatctggatatcctcgacgtgatcgctgatccaggcgggaaaatcgggagtcgtcaggctgagctccgtctgcgggcggtcgaggcgggcgtaggtcaggagctcttcaatcagcgcctccagctgaccgatatcgcggttcagcgcctgcgattccgcctcggtgagattctcgctcatctccagacggtagcgcaggcgtaccagcggtgtcctgagttcatgggcgatgccgtcaatcagctgctttttgctggcaataagcgcattaatgttatcggccatttggttaaaggccaccccgagccgctcgaagctggacatactgtcgaagtgaatgcgctcgctgaggtgaccttcgccaaagcgctgggcggccgtctcaatgcgcagcatgtcctgccagtgcgggcgcatccagataaacaccggaaaggccagagagatagcaataaacgccattagcgccacgtccagcaggcgcatctcatgcagaaaatagagatagggcaccgggcccaccgacagcacatagtggctgcggggaatgcgctgaataaaggtgtactgatcgtcgagggcgacgatatcgccggcgcgcaggtgctgcatcgagctttccgacagcttaaatttgctgatcggctcgatgtgcagatcaaacgataaattcaggtccagctctttaagggtcttgctccagtcgcgcggcggtatctcccgcagctcgctgcgcatcagatacagcgagcttttcatcaaatcgtcaagcgactgccgtccggcgcgctccgcggtaaatttatagaccagaccgaccagcatggtcatcaccagaaagcagacgaagagcagaagatagaactgcacgaacagctttttcattacattaccgcgtattcaagagaaacctgtctggcgccccaggggcatcttctgcgcgtcggggagtcaatgttatcgatatccccgggcgaggcgcggggaaatcatcgatacgctatcaaagcagggtttatgccccctgacaatagccagcctggagacagaacggtgaaaaggtgacagtgtcactcgatgcggtgatttcttcaccctcggtgggagcagggcaatcgtattttgtgcgtcgatggatacgctactcacgataataaggaatgtctaccggataggtggtcgtcagactcagcagccgacagcgcaccagtttttccgtttcggcataccagtaagcaaactcgccggtggtctggtggtaaatcatctgatcgaggttggcaaacgggatcaccagcagcggcccctggcgaacgtggccgccgccggtttcaaagtgatgctgcccccaggattgctgggtatgttcatagcgatgaaggatcacctcgatttgcccgcgctgcggacagaggagtcgaatatcggcgttgtcgagggaaaaagcccagccagagagagaagtgaacagtgagagtgccaaaagtacaacgtatttcatcatgcaaaagtcctgtgttttcaggctttatgccactctgacagcggtaagtccttgagcacaatcatattgaggagttatgtgatggggttctgtacggctaattctattgatttaatcaatatgacaagttccggtgatgaatgtgcgcgccagggacgaacgcagcaggcagcaaacgtgataactttgccgccggcgagcgcgcgatgagcgggcccctcgcagggccgcagaagggctgcttagttatcccaggcgtgaggggcgaacaggtagcctttgttgcgaacggtcttaatacgatagggctccgtggcgttgtcgagcagttttttgcgcaggcgggagatagccacgtcgacgctgcgatccatcccgtcataggtaacgccgcgtaaatttttcagcagtgcgtcgcggtccataatctgcccggcgtgggtggccaactcccacagcagatcgaaatcggcggtcgacagggcgacgttttctccgccaagcagcacctggcggttgaccgggtcaatggtcagcgagccgaaggagatggttttatgtggcgtgagcgttgaggaggcggatccggcgcctgccggagcaatatgctggcgcaaatgcagacgcagtcgcgccagcaggaccgctggcggggtggttttcagaatataatcgctggcgcccatctccagggagaggatatggttcatatcgctgtcgagcgaagtcagcaggacaatcggcccttgccattgcccgcgcagatcgcgacagagcgtcattccgtccttgccgggcagcataatgtccagcagcaccagatccggtttctcccgcgcgatcacctcctcagcgcggtcgccgcgaggctcgaccaccacatccatatcatgcttgccgagataggcggcgatcagcgtgcctacctcagggtcatcctcaacaaaaacgattttattcatgtctattgcacatcagtaaaagaagtaacatacaccgcacttattttacccgccattactcttttataaacagcgttaaatccgctatgctgccctaacttattgattcactgttaaggcatacgggcatggggctgttaatcaaagggctgctgggagcgctggtggtggtgctgattggcgtgctggcgaaaaccaaaaactacgctatcgctggcctggtcccgctgtttcccacctttgcgctcatcgcccattatattgtcgccagcgagcgggggatcgaagccctgcgcgcgaccatcgtattcggcatgtggtcgattcttccctattttatctatctgctgtcactgtggtatttcaccgggattatgcgcctgccgttggcgctggcaggcgcagtgggatgctgggggctgtgcgcctggctgttaatcctcggctggagccgtttccactagcgcagcgggcggccgccgtcgacagcgaatgagcggccggtaacgtagcggctggtaaacaggtaatcgatgagatcgctaatctctttttcgccaggggcgattttcatcagcgatttatccagcgcctgctgacgataggcctcgtcgtcaccctcattaaacatgattagcgacggcgcgatggcgttgaccttaacctctggcgccagcttgcgagcgaaggagcgggtcatgttatccagggcggctttgctggcggcataggcgatatgtttgtcgctcccgcgctccaccacgtaatcggtgatatggataatgtcgctggcggcatggccgtggccgcgcagcaacgcctccagcgcatggttgagcagatagggggcgtggacgtggatctgcatcatgcggttgatgacggcgctcagcgggacgcccggcttttccgccatccagtcgctggcgttatggatgatggcgcgcagaccgttggtgtgtgatttgaccgcttcagcgaaggtcagaatgccgtcatcgctgctaaaatcggcctgcaggcagagcgcgcccgcttcgcgcaggccgtcaatcgccggatagggcgtacgatagctgacgatgaccggctggcgctgctgcagaaaatggtgtgccagagcgaggccgatgcggcggcctgctcctgtgatcagaatcgggcggggctgttgttcagccatgggtatctcctatgcgttctgcggcagggcgaccgcttaccccaccagcatccacgttgccggcacagcggcaaccagcaataaaccaattagcgccacttcgcggcgtttgagcgaacgatcgtgctggtgcgtacgtcgggcgtacaaaaagaccagaagacccggagcgtaaagtaccaccgacaacagcaaatgcacaggccccgacgcgtataataaccatatgccataaatacaggcgccgatagccaccgctttatgcagcgggcgagtggcgattttcagcagaaaggcgccgaccagcagatagggcacgagaatcatctcagaggcaatggtcagcagcgtgccgtagtccgatccggtcagccagatcagcaccagcgatacctgaacgctgatattggtcaaccacaatgaggcggagggggcgttgttgctattctgacgggcaaacaggcgcaggaaggctttatgagtggcggcgaggaaaggcacctccgcggccatgatggtccagctgagataagcgccgcacaccgacacgatcagcccggcggcaatgacgatctccccccatgaccccatcagcctgaccatcagtcccgccatcgacgggttgcgcatttcggccagttcgctgcgcggcacaacgcccagcgacagcagggtgaccagcagatacaccgcgagggccgacagcaccgccagcagcgtcgcgcggccaacgtcgcgcttgtgtcgcgcccgcgcggacacgactaccgccccctccacgccgataaacacccacagggtgatcagcatggtgtttttgacctgctcccataccggcacgcccagcgccaggccgctaaaatcgaggcggaacgtatccagctgaaaggccagggcggcgagcgcgacaaaggcgcccagcggcagaagcttggcgagggtggccaccaggttaatccccgctgccgtctggacaccgcgcaggaccagaaagtggacgacccacagcagaaccgacgcgccaacgatagactgccaggtattaccatcgccaaacaggcgcagctcaggggtatcggtgaaaaaactgagcgccgaaaagacgataaccagataggagacgttggcgatcaccgcgcacagccagtatccccaggcggagcagaagccgatcagttcgccgaatccttcgcgagcgtaggtgaagatcccgccgtcgaggtcgggacgaatacgggtcaacagcagcatggcgaaagcgagaaacaggatcccgacgccggtgatggcccagccaatgagcagagcggaggggctggccacggcagccatattttgcggcaaactgaatacgccagcgccgagcattgagctaaggaccagggcggtcagggcgctcaggcccagtttcttttccattgcattcccgaggtgaaaatggctgttccagaatatttattttgcgaaatcgcataaaaatggaggattgcgctaaggcgcgggattttacggagtgtccgggggccatgcaatggcgggggatgaaaaaaaatgaaaaggcggcaatgcgccgcctttttagccagccagcagcgattatttgtacaaatcggcgctgatggtgatgttgccgccgcgttcctgccactggcgggtgatgtggtagtacttcgcccctttcttcgccgcgcgtttcgccgtctgataggagatttcggtcatgttgccgtagttgccggtgaactggatgttatcgaacggcaccatttgcgccgcagtcactttgttcacttcttcgaccttagtgccgttcggcagagtgacagtgtaacgtccacctttcgaagactgagtctcaaagaaacgcccaacgccggtacccgaacccaccgcggcggtggtggcaacgcccggaatttcaacgttcttcgccgcttcgccgcctttggccagcgctgcgcggccagcttcagagtcagccgggatagcgtccgggctctgcagcacgcgtttttcagcatcttttttgtagatataagcggtaatgcgctggttgccgccctggttggcgtcaacctggcggacgataaagaacgcataggcgccttttgctttcgccgctttggtgatggcgtcgttgacttccggctggctgcgatagaagccctgaacggtgacggtgtcgtaaggcatcagctcaacggcctgatctttcggcaactccatcacgccgttgataatgcgattcttcggcgcatccgctttcggcgcgtcttctttataaaggtcagccgtgacgcgccagttgccgccattgccgtagtccgacgtgtcgacaacatagaatgaggccgcgccgtctttgtcggctttgcgcgatactgcctgtaccgcatcgccaatggcattaaaccggccggtgacgacaacgcgatcgtagggcttcagcgcagccgcctgctccggggtcaactcggtcgctgcatgggcagacaacgtggcggttgtcaggagagcagacgccaggagggtgtttttaagcttcataaaaataatcctttgccttgcgcaaaccatatactggtgttgttgttgactgaaaacgtttgattattgcatttaatcgccgtgactgtctgcgtcaatttttgcttgccgcccgaatcgtatactacggaaagataacatttttcgatatgttgaaaaaacaggcgcttgaccagcaaaaacgataatcaataccacttttattagttaatgtaatgttaacacaatgatctcaatggcgataaatggcgttttataccgcaggataagcggattatcaggcctgggcggcaaattcaggtaaatattgctgcccggacccatctgagctgacaataagcaataaaatcaaaatttgtgttttatcgcagtagatcacaatcggtattttcagtaggttataaaaagtttgttactgtttcattttgtagacagcgaaagatggcgaggaagattttgccgtcctggcgttgttgggcagaaaagtaaaccatcatcaaaaaccgatggaagggaaaactatgcgtattggtgtaccacaagaaaggctagcccaggagacccgggccgccgccacgccgaagaccgttgagcaattgctcaaactcggctttagcgtcgcggtagaaagcggcgccgggaagctggccagctttgacgatgaggcctttgccgaggcaggagctgaaatcgtgaccggcgacgaggtatggcagtctgatgtcatccttaaggtcaatgctccgaatgacgatgaaattgccctgctgaatccggggaccacgctgattagttttatctggccggcgcaaaacccgcagctgatggaaaaactggcggcccgtaatatcaacgtaatggcgatggattccgtgccgcgtatttcccgcgcccagtcgctggatgcgctcagctcaatggccaacatcgccgggtaccgcgctatcgttgaagcggcgcatgaatttggtcgattctttaccgggcagattacggcggcaggcaaggttccgcccgccaaggtgatggtcattggcgccggggtagccggtctggcggcgattggcgccgccaacagcctgggcgctattgttcgcgccttcgatacccgtccggaagtgaaggagcaggtgcagagtatgggcgccgagttcctcgagctggattttaaagaggaagcgggcagcggcgatggctacgccaaggtgatgtctgaggcctttattaaggctgaaatggcgctgttcgccgcgcaggcgaaagaggtcgatatcattgtcaccacggcgttaatcccgggcaaaccggcgccgaagctgatcacccgcgaaatggtcgactccatgaaatcgggcagcgtggtggtcgatctggcctcgcaaaacggcggcaactgtgagtacaccgtaccgggcgaagtggtgaccaccgccaacggcgtgaaaatcatcggttacaccgatcttcctggccgtctgccgacccagtcctcccagctctacggcaccaacctggtgaacctgctgaagctgctgtgcaaagagaaagacggcaatatcgttatcgatttcgatgacgtggtagtgcgcggcgtgaccgttgttcgcgaaggtgaaatcacctggccggcgccgccgattcaggtctccgctcagccgcaggccgcggcgaaaaaagtggaagcgccgaaagaagcggtgaaaccggcgtcgccgtggcgcaaatatgcgctgatggcgctggcgattattctcttcggctggctggccaacgtggcgccaaaagagttcctcggccatttcaccgtcttcgcgctggcctgcgtggtgggttactacgtggtgtggaacgtctcccatgcgctgcatacgccgctgatgtcggtgaccaatgccatttcgggcattatcgtggttggcgcgttgttgcagataggccacggcggctgggtcagcttcctgagctttatcgcggtgctgatcgccagcattaatattttcggtggttttaccgtgactcagcgcatgctgaaaatgtttcgcaaaggataaggggtagcacatgtctggtggattagtaacggctgcatacattgttgctgcaatcctgtttattttcagcctggcgggcctgtcgaaacacgaaacgtcgcagcagggcaactatttcggcatcgccgggatggccattgccctgatcgctaccatcctggggccggacgccggcaacgtcggctggattattcttgcgatggtgatcggcggggcgatcggtattcgtctggcgaagaaggtcgagatgaccgaaatgccggagctggtggctatcctgcacagcttcgtgggtctggcagcggtgctggtgggtttcaacagctacctgcagcatgaaaccggtatggagcaaattctggtcaatattcatttgaccgaagtgttcctcgggatcttcatcggcgcggtgaccttcaccggttcggtggtggcgtttggtaaactgcgcggcaaaatttcctccaggccgctgatgctgcccaatcgccataagctgaacctggcggcgctggtggtttccttcatcctgatggtgatttttgttcgctctgacagcaccggcacccaggtcctgtgcctgctggtgatgaccgcgatcgcgctggcctttggctggcacctggtggcctctatcggcggtgcggacatgccggtggtggtctcgatgctcaactcctactcgggctgggcggcggcggcggcgggctttatgctgagtaatgacctgctgatcgtcaccggcgcgctggtgggctcttccggcgccatcctctcttacattatgtgtaaggcgatgaaccgctcctttatcagcgtgatcgccgggggcttcggcaccgatggttcctcaagcggcggcgatgaagaagtgggcgagcatcgcgagattagcgccgaagagacggcggagatgctgaaaaactcgcactcggtgatcatcaccccgggctacggtatggcggtggctcaggcgcagtatccggtagcagaaattaccgagaagctgcgggcgcggggtatcaaagtacgctttggtattcatccggtggccgggcgcctcccggggcatatgaacgtcctgctggcggaagccaaagtgccttacgacatcgtgctggagatggatgagatcaacgacgatttcagcgacaccgacaccgtgctggtgatcggcgccaacgataccgtcaacccggcggcgcaggacgatccgaagagcccgatcgccggcatgccggtgctcgaggtgtggaaagcgcagaatgtggtggtctttaagcgttcaatgaacaccggttacgccggcgtacagaacccgctgttctttaaagagaacactcatatgctgtttggcgatgctaaagccagcgtcgatgcgatcctgaaagcgctgtaatgtaacataattgttttacaacgtttgtttataagccgtctcctgtgagacggcttttttatatgcagggagatgcctggaattgttcataaaataagcggcaagaggtgatataatgttccggttcttacatcagacagaggatattatggataccgagttaaccccaacgcagatggccatcgaattcttacgccgcgaccccaccgtcatgaccccagcgcagtatctgaaaaaacttaaactgctggagctggagtttgctgacctgatggcgctctcctcgctggagctgaaagaagagatcgatctggcctggcgtctgggtatccactaagccattctcgctggacagtgacaggggccgccaacggccctttttttgtgcctggctggcagcaagcaaaaaaatcccccgcgaggcgggggaagatgagtggtagcggttaatcgtcgtcgtcgtcgtccagttccaccggcgtctggtaggcctccggtttcagcaccaacaggtcacagcgcagatgatcgacgacctgttccgcggtattgccgaggaacgccgccgacaggccggtacgtccgaccgttcccagcaccacgatccccgcctgcagatgctcggcgaggtccgggatcacctcttcaggcagtcctttttcgacgtgggtgaatttttcatcgatgccaaacttctgccgcagcgctttcatcgccagcagatgctggccgcggatcgcgtcgttgtagacgctgggatcaaaatccggcagttctatcgcgatattgatcggcgtcaccgggtaggcaccgatcaggtgcacttcagtgtggttgacttcttccgccagcgacagcgtctcgcgaaccagcttctcgttaagggtgttgtgataattctcttcgctggcgagattgacggcgaccagcgctttgccgccttccggccacggctggtctttgaccatccacaccgggcaagggcatttacgcagcagatgccagtccgtcggggtaaagatcaccgcctccagtttgtcgtgctggtgggccatcttcagcagcagatcgtgtttctcactgaccacctcctgaataatcgcttcgaaggggcggttgtgccacaccactttcacgtcaatcggcacgcccgattccaggtagaatttcgcctgctcgcggatccaggccgttcgttgggcaatgacgccctggcgcattgccgtcctctcgtccggcgacagcagggtggtcatttcataggaaaaatcatagatcggcaaaaaggctttgatgcgtccaccaatccgttggtgcaggtacaccgctcgccttagcgccggctggtcgtcctggttaggatcgattactaccagcatgctctgatacttcgccatacagggtctccttacaactgcagctaccgtcagttattaaaaagataacctatatggatgaattgaaacaggggaggagcctggtcagatcaacaaatctgaaaaaattgccgatcgtgaccaggtattgcgcagagattaagcgacgttgcgcgcctgtccggccagctgggccagcagatcgctgttttcaatagtgatatatttgcctttcaccgccagcatgccgcttttctgaaaacggcccagcagacggctgatggtttcgacggtgaggccgagatagttgccaatatcgccgcgggtcatggtcagccggaactcacgtggtgagaagccgcgctgggcgaaacgacgagaaaggttatagataaacgcggccaggcgctcttcggcattctttttggaaagcaacaggatcatatcctggtcgcctttaatctcaccgctcatcaggcgcatcatctgctgacgcagattgggcatttttccggaaagatcgtcaagggtttcgaaggggatctcgcagaccattgaggtttccagcgcctgcgcaaagctcgggtgcagaccggtgccgatggcgtcaaagcccaccaggtcgcccgccagatggaagccagtaatctgctcatcaccttgctcggtgatggtatagcttttgatggtcccggagcgaatagcgtacaacgacttcagctcatcaccggctttgaacaaggtttgacctttctggataggctttttccgctcgataatattatccagctgatcaagctcatgctcgttcagagtaaaggggatgcagagctggctaatgctgcaatcctgacaatggattgcacaaccgccagactgaatgcgtcgaataattcgcttctcagggatcatatgtctgctcaggccttaattgatattggtcaattttaacatctttttgatcagcaggtaagtcttcaggcccggaaacacgtaatatcagcagggtaaatcaaattgcttgtgtatctatttgattaaaaacagattattacgccacttttgattgtaaaattacctgaaaattccagaaaaggcattttcagtcaaagcaacagatagccctcgtgacgcaaaagccactctttacgctgtacgccgccggcatagccggtcatggtgccgttgcgcccgatgacccgatggcagggcaccacgatactcaccggattggcgccattggcggcgcccaccgcgcgcgcggcgccgggacgaccgagcgcctcggccagttggccgtagtgcatcacctggccacaggggatttcgcgtaacgcctgccagacctggcgctgaaaaggggtgccggcggtggcggtaggcagagtctcgataatggctaaatcgccggcaaaatagtcgctcagcttactgctgagaccgccgggattgcggcagtcgacgcgctgatagccttcccggcgatagtgtacctcgagcagcgtttccatccgatcgcggtgctcgtcccactcgacggcgcgcaaattaaactgttcgtcgcaaagcacccacaacggccccagcggggtatccattttatcctgcagcaaggtcaacatcgtttctgtcatccaccatcgtacatgagaggcacacgataccacgcgctgacggcagtcaactatactcccaaaaggtaaaaccgcatcgccagatagcacggcgggctatccgccgtggaggtattctgcgatcgccacgatgatttatttttggatcgatcctggcgggttaccggacagggtttttgctacttttaagctgacgacgtcggtcctccgcgccgctgtgcgcgctcgggaaagtgctaccgcgtcggcgcggcgcggttaataactcagaggtggagctatgcaatatatactgactggcgtaatcgtactgatcttcagcggtctggttattcatggtatgtcgctgttgcttgagcgagggtatcgcgcgcttttcggcatattcgccggagccggggaagcgacccgtaagttcaaagtgaagatatcgcgttaagctaaggtggccgtccctggcgcatcggtgggttaagacagccgcggatagatgccagggccgatcggcagtcccaccagataccagcccaccagcaacagcagccagacggcgagaaaaatcagcgggtaagggagcaccagcgagtagtaggtgccgaggcgggcatccggccggtagcgctgtagaaagccgagaaacaacggcacaaacggtgacaccggcgccagcggcagcaccgatgaatcagcgatacgaaacaggatctgcgcaaacgccgggtgaaagcccaacagcataaacattggcacgaagatcggcgccagaatcgaccagatggccgagccgctggcgataaacatacacagaaaagccgacagcagcgcaaggccgacaaacgccggaacaccgttcatgcctgaactctccagcaggtccgtcagaccgacggccataaacttgcccatgttgctccagttgaacatcgccacgaactgcgccagcgggaagaccatcacgataaacccggccatctctttcatcggctcaatcatcaactgcggcaggtcggcctggcggcgaattttgccggtggcgatgccgtatgccagcgacacgacaaagaagaaaaagataattagcggcacgatgcctttgataaacggcgagggcatgaccgtatgctgaaccggatcgcgaagaataccgttttcggggaccaccatcagggcgatgaccgccacgaataccagcgtcgccacgccggcgatgcgcaggccgaaccgctccccgggcgtcagcgtctgcagcttttcatcacgactgccttgccactggcccagccgcggctcgaccagcttatcggtgatcagtccgccgacgagcgtcagaacgatcactgaagtcgccataaagtaccagttgtcgatcacgctgacgtgcaaagaggcatcgatggactttgccgcctcggtgctgatcccggagagcagcacgtcggtggtgacaatcagtagattggcggtaaagccgcagcccacgccggctatcgccgccagcagaccagcgacaggatgccgaccgacggcaagaaacatcagcgctcccagcggcggcataatcaccagcgccgcatcggaagagatatggctgaaaaaggcgataaacagcaccatatagctggcatagcgggcgctgacgtgcgaggccatcttgaccatcaacgccggtaacaggcccacccgctcggcaaagccggcgcccagaaccagggcgaggatcgcccccagcggcgcgaaaccgctgaagtttttaatcacgttcggcaaaaaccagtgcaatccttccacgctgagcaggtttttgaccaccacccgcgaaccgtcagttgggttttgtaccccaacgttgagggcggagaggattgccgtggcagcgatcagcacggcgatgagatagataaacagcaaaaacgggtgcgggaccttgttaccgatcttctctacccagccatagcgctttccgccgggggaagatgacggtatggatgacatactcatgggcattcctctgttgtcgttgttgtgttgggcaggcctgctcccgtactgccggcggttattatgggcggtgcgtgccgcgatccggtcagcgttggccaggagtagcctctaagtggttatcgtaaaacggacggactcacctccgccgggatcgggcaacgataggggcgttcggccagtacctgcctgagctcttgctggctggcctccagcagggcgctgtcgctgaataaatggatggcggtcgccgcgaggactttccccgccagcaacatccctttatgggcaatggaggttctgccctggctcaccagctgccagctgtgcagcggggtacccaccgcgaagcacgggctgaagcactgggccaccggcgctttccagctaacatcgccgacgtcggtggatccggcgaggacgttatccgtggccgcccagggcgccacctcatcaatcagcaaggtgtcgcggtgacgacgagcgaacgttttgccttcctcgccactggtgccggcaatattgttcaggctgttgttaatatcgttggcgctgagagtggcgcggatcgccgcggcaaaagcgcgttcctcgtcgctccaggcgggggtaccgtaatgacagaccgcctgatacatcgccgcctcaagcgtgcggttgggcagatagctggagcaggctttttcaaagcggcagctgacctgggtctcggtcatcagcgcggccccctgggcaatcttctctatgcgggcgaagatttgctcagcgtcggccatctccggcgcgcggatcaaatacagcacttccgcctgcgcctgcaccacgttgggcgagacgccgccggtatcggtaatggcgtaatggacgcgcgccttctcgatgatatgttcattgaggaaattgctgccggtggtcatcagggtgacggcatccagcgcgctccggcccaggtgcggcgaattagcggcgtgggccgcggtgccggtaaatcgccatgccgcctgaatgttggcgagggtgcgggtgctgaacatcccggcccaggcttccggatgccaggtcagcgccgcatcgacatcatcaaacaacccttcgcgcaccataaaggtttttcccgaaccgccttcctcgccgggacaaccgtagaagcgcagagtgccgctgtcgccgtgctgctgcagccagcctttggcggcgaccgccgcggcgaatgccgcggtgccgagcagattgtgcccacagccgtggccgttggctcccggcgtcaagggcgtcggttccgcgctgtgggcctgctggctgagtcccgccagggcgtcaaattcgccgagcagggcaatgaccggttggccctcaccgacgctggcgataaaggcattcgggatcccgccagcatcgcgggtgagctgaaaaccttccgcctccagggcgtcggccagccgttgggctgaccagaactcctcaaagcgggtctccgggtggtcccagatgtcgtcggcgatggcgcagtaagtgtcgcgttgtgcctcaaccacctcgtccacaaactgaaaaatggcttccattacaccccccgctgccagggaaagttaagcgcgacgcgcgccagggtttcgaccgctaccgccatcacgctctcgtcgaagtcaaacttttcgttgtggtgaccggcgctgagttcagtgccgaaaatcatgtacgaggcgaggccgccgcgcgcctggacccgggccatcatcagggtggcgtcttccgagcccgccggggcggcgatgcgatccaccgcctgttgcacgccgggcacccgggcggcctgttcgcgcagatagtccacccacgccggcgacggtgcgctggcggtcgccgcgcccatcatgcgcagttcgtagcgggcttcgtacatcgccgcagccccggcgacgacgtgctgcgcccgctcgaacacgtactgattaatggcttcgctttcgccgcgggtttccacttttaacagcgcggaagagggcaccacgttgcgcccggtaccggcctgcatcaccccgacgttgacccgcgaggcgccggcgctgtgcggcgggatggcgtgcaggccaagggcggcctgggcggcggccagcagcgcgttgcgcccgtcctcgggcttgccgccggcgtgggcggccacgccgctgaactgcacgtcgaatttggtggtggccataaagttgtctccaccgcagaccacggtacctgccggcacgccggtcccgatatggatcgccgtgaaataatccacgtcatcaaccacgccggcggccaccatcgcgcgggcgccgcgggtaccctcttcagcaggctggaaaatcagtttaatgacgccattgagctgggcggcatactgcttgagcacatgcgccagccccagcccgatggcggtatggccgtcatggccgcaggcgtgcatcatgccggcgttgcaggaggcgaaatgatcgcgatgggggcggtggctgtcgtcatgctgttcgttgagatcgagggcatccatatcgacgcgaaaggccagggttggtccgggccgcccggtgtcgagcgtggccaccacgccggcgaaaccgccttcaaacgctggcagccagcgctccggcgcgccctgttcgcgggcgcgttcgaaagcctgggccagggtctcctcgtccggcagccccatccggctgtcggcatcgatgacgtcgcggcctagcgccagctgatagcctagcccgtcaagaatatccgcgaccatactggcggtgcgaaactccagccagccggattcagcgtgcaggtgaaaatcacggcgccattgggtcatggagggcgccagttggcggaggtattcatcaagttgcggcatagcttatcctgtcataagtaaaaaatgtgacggcgttcacgatgtgatagcttttgtttatcactgacgcgctacaggccttaacaaccttaacctgccacagcctgatggattacagtagatgtcattttcttctgtctgataagcaacggttatcactaaaagcatggcatttcagattaaatttcatcaaattcgcgccttcgtcgaagtagcccgggaaggcagtatccgtggcgccagccgggcgctggcggtctcgcagccggcgctgaccaaagcgattaaagagctggaggaggggctttccgcccagctgttcgtccgccgcagccagggggtggcgttaaccgacaatggcgaaagtttttatcaacatgcgagcctgatccttgaggagctgcgggcggcgcaggatgaactgctgcagcgccagggggaacaggccgggcaaattaatattggccttggcgccagcgtcgcccggtcgctgatgccgtcggtgatctgccgctttcatcagcagcatccgcaggtgaaggtacggatcatggagggtcaactgctggcgatgattaatgagctgcgccagggggagctggatttcaccattaatacctattaccccgggccgtacgaccatgagttcagctttgagaaactgtttgagaaaccgttcgcggtgttcgcccgcgcgggccatccggcggcgcaggccacctcgctgggagaattgatggatcaccactggaccatgccgacgccgcgcggcagctacttcaagcagctgcaggaatgcttcgaacagctgggacgggagccaaaggtggggatcgtctgcgaaacgttctcatcctgcatcagcctggtggtgaaaagtgattttctcagcatcctgccggtggagctgggcaacgacccgctgatggccgacaaactggtgatgatccccatccgtgaagtgttacccaccgccacctattatctgatccagcggcgcgatacccgacagacgccgctcacggcgtcgttaatcaccctgttccgccgccagagccgacaattgtttccttaatcgttcgtcacgctcactttgccagcgaacgcggctaaacgcgttgagaggggagcgcgaggcggctatagtagctggcgacagccgctggaggagagcccatgaaccttgatgacaaatccctgtttcttgacgccatggaagatgtccagcctctgaaacgtaataatgacgtgcactggcatcccgggcgtaacagccgggccccgcaacgcgtcgataccctgcagctggataattttctcaccaccggctatctcgatatcgtgccgctcgccacgccgctggagtttaagcgagaagggctgcagagcggcgtgctggataagctgcggcgggggaaatacagccagcaggcgagcctctccctgctgcgccagccggtggaacagtgccggcagatgctcttcgcctttatggtgcaggcgcagaaagaggggttacgcaatgtgctgatcgttcacggcaaaggccgcgacgaccagtcccacgccaatattatccgcagctatctggcgcgctggctggaagagctgccggaggtgcaggccttctgcgccgcgcttccgcatcatggcggcagcggcgcctgctatgtcgcgctgcgtaaatcggcgcaggcgaagcaggagacctgggagcagcacgccaagcgcagtcgttagcgcagaagcagcgtcagctcgcgggcggctttttgcagctccggcagcacgcgctcgatcatctcgcgggccgtcatctggcccgcatgcaccccgacgttgagcgccgcctggacctgcccctgagcgttaaacagcgggaccgcgagggagcgcagccccatctccagctcctgatcgttgagggcatacccctgctgatgcacccgtttcagttcggcgcgcagcttcgccaccgaatccaccgtctgtggggtatagcggatcatggtcacccgggccagcatatcgttgagcttctcctccggctgatggctcagcagcacccggcccatcgaggtcgcccacgccggaaggcgactgccgatatccaggtcgatggtcataatccgcgagctggaggcgcgggcgatatacaggatatcgtcgccgtcgagggtggcgatggagcaggactcattgagcatttcgctcagatgccgcagcaccggctgcgccgaacgcgccagcggcgtcgaggccagccaggcgtggcccagcgccaggatccgcggccgcagctggaaattcttaccgtcttcggcatacacgaaccccagcttgctcagggtatacaggcagcggcgcaccgcggcgcgcgggatgccggtcttctgactgatctgtgagatagacagcaggggccgctgcggcgtgaacgcctgaatcacctccagaccccgcgccagggaggccataaagttaggatcgcctttaaacggatcgccgtcgccggtcagtaaatcgtctggatgcttgtccatttctgttccccatatttgccatcgatcacattctttcgctaaagataaccgatgttcgattatcgcaccatatttcgattatcgcccttgaccgacatcgttaagcgggtcacattttgtgcgaacaacgaataaaagtgcgattaccgcacatcactggagcgacctgatgattgataaaagcgtatcgacgctgagcgaggccatcgccgggatccacgatggggcgactattatgatcggcggctttggccccgccggccagccgacctttctgattgacgccctgattgaccagggcgctcgcgacctgaccatcataaataacaacgccggcaacggggaagtgggtctcgccgcgctgctcaaggcgggccgggtgcgcaaaatgatctgctcctttccgcgccaggtggattcgcagattttcgatgatctctaccgtcgcggcaaagtggagctggagctggtgccgcagggcaacctcgcggcgcggatccaggcggccggcgccgggctgggggcggtgtttacccccaccggctacggcacgccgctggcggaaggcaaggagacacgggaaatcgacggtcgccactacgtgctggagtacccgatcaaagccgatttcgcgctgattaaagcccaccagggcgaccgctggggcaacctggtctatcgcaaggcggcgcgcaactttggcccgatcatggcgacagcggcgaaaaccaccatcgtagaggtctcgcagctggtggcgctgggcgacctcgatccggaaaacatcatcacccccggcattttcgtccagcgcgtcttctcgctggaaaacctgactgccgcacaacgcgcctgaggagcccgacatgcaaaaactgacccgtgacgaaatggcccagcgcgtggcccgcgatattcccgaaggtgcttacgtcaacctcggcatcggcctgccgacccggattgccaattacctgcccgctgacaaagaggtgttcctgcacagcgaaaacggcctgctggggatggggccgaaaccgcagcccggggaagaagatcccgagctgatcaatgccggtaaagagtatgtcaccctcctgcaggggggctgctatttccaccacggcgactccttcgccatgatgcgcggcggccatctcgatatctgcgtgctgggggcctatcaggtttccgccagcggcgacctcgccaactggagcaccggtgcgccggatgcgatcccggccgttggcggggcgatggatctggccatcggcgcccgccaggtatttgtgatgatggaccacctgacccgtgacggcgagtgcaagctggtggcgcagtgcagctacccgctgaccggcgtcggctgcgtcagccggatctataccgacctggcggtgatcgacatcaccgaccgcggcccggtggtgcgggaaatctttaacggcctctcttttgaagagctgcagcgcatcactccggtggcgctgacctttcaacaactggcggaaagcgcgtaaggaacctatgatgaatcaggcatttatctgtgatgcggtgcgtacaccctttggccgtttcggcggtgccctggcgacgatgcgcgctgacgacctggcggcgctgccgctgaaagcgctgctggcgcggaacccgggactggatccctcgcgcattgacgatgtgatctttggctgcgccaaccaggccggggaagacaaccgcaacgtggcgcggatggcgctgctgctggccggcctgccggagagcgtgcccgggagcaccatcaaccgcctgtgcggttccagccttgacgcgatcggcgtcgcggcgcgggcgattaaaagcggggagacgcagctgatgatcgccggcggggtggagagcatgtcccgcgcgccgtttgtgatggggaaagcggagagcgcctttagccgcagcatgcagatggaggataccaccatcggctggcgctttattaacccgcagatgaaagccctgtacggcgtgcattccatgccggagacggcggaaaacgtcgccgatgagtttgccatctcccgtgccgatcaggacgcgttcgccttacgcagtcagttgcgtaccgccgcggcgcaagaggcggggcgtttcgccgatgagctgatcgccgtccaggtgccgcagcgcaaaggcgagccgctgctgtttagccgcgatgagcacccgcgcagcacctcgctggaggcgctggctaaactgcgcggcgtggtgcgcgccgacggcagcgttaccgccggtaacgcctccggggttaacgacggcgcctgcgcgctgttgatggccagcgagacggcgctgtcggctaacgatcttcagccgctggcccgggtggtcggcgtggcgacggcgggcgttgcgccgcggatcatggggtttggcccggcgccggcggtgcgcaaggtgctggcgcagaccggcctgacattaggccagatggatgtcattgagctgaatgaagccttcgccgcgcaggcgctggcggtgacccgcgatttaggcttaccggacgatgccgcccacgtgaaccctaacggcggggcgattgcgctgggccacccgctcggcgcctccggcggccggctggcgatgaccgcggcttatcagctgaaacggaccggcggtcgttacgccctgtgcaccatgtgcatcggcgtcggacaggggatcgccctgattattgaacgtgtttaaggagccagaatgagtttgttgaccccgatgctgcgcagcagtccgctaaccgactggttcagcgacgcgcagcgggtgcagggcatgctggattttgaagcggcgctggcgcaagcgcaggccgcctgcgggatggtgccgccggaagcggtcgggccaattgtggcggcctgccgccacgaggccatcgattttgccgcgctgggcgaggcggcggtgggagccggtaatctggccatcccgctggtgaaacagctgacggcgcaggtaaaagcgcaagatcctgaggctgcgcgctacgttcactggggcgctaccagccaggacgccatcgacaccggactggtgctccagctgcgcggggcgctggatgccgctgagactctgcttgagcagctgttggcggccctggctctccaggcggatcgttatcgcgataccgtgatgccgggccggacctggatgcagcacgcgctgccggtgacctttggcctgaagctggcgggcaccctcgacgcgctcctgcgctggcagcagcggctgcgcgagatgcgtccgcggctgctggcgctgcagtttggcggcgccgcgggcactctggacgcgctaaaagagaaagggccggcggttggcctggcgctggcgcagatcctcgggctgtcgctgccggatactccgtggcacagccagcgcgatcggctgctggaggcgggcgcctggttcgccggcgtctgcggcacgctggggaaattcgctaacgacttttccctgctgatgcagaccgaagtggctgaggtgggcgagccggtggcggaaggtcgcggcggttcgtcgacgatgccgcataagcgcaatccggtggcctgcgcggcgatcctgaccgccgcccagcgtacgccggggctgatggcgacgctctacgccagccaactccagcagcatgagcgggcgctgggcggctggcaggcggagtgggagaccctgccggagctaattaccctggtgggcggggcgttggcgcaaagcgaggcgctggtgcgcgacatgcaggttttcccgcagaaaatgcgcgccgatctcgatatcacccacgggctgattatggctgaggcggtgactctggcgctggcggaattcattggcaaagccgaggcgcatcatcacatcgaagcgctgtgccgccaggcgctggaccgtcactacccgctggtcgatctgctcgcggctgacccacaggtcagtcagtatctctctcgtgaacgcttaaccacgctgctggacccggcaacggcgaccggcagcgccgaacgctttgtgcgccaggtgctggcgcgttatcaggagcaacgtgatgaatcttgattatcaactcgacgggccggatggcgcgccggttatcgtcctctccaattcgctgggcaccacccgggcgatgtggcagccgcagatcgaggcgttaaccgcccatttccgggtgctgcgctacgacacgcacggccacggtaaaacgacaaaaaatggcaaagtgaccctcgcccagttgggggaggatgtgattgcgctgctcgatcacctgaatatcgaccgcgcctggttctgcgggatctcgatgggcggtctgaccggcctgtggctgggacgctttgcgccggagcgttttcatggtctggcggtcgccaacaccgcggcgcgcattggcgatcaggccagctggctgtcgcgggcgcgggccgtacgtcaggaggggatggcggtggtggccgccggagcggcagaccgctggtttacccacgcgtttcgccagaaggcgccggaggtggtcgaggcgctttgtcaccagctgacccataccgatgctgaaggctatgccgcctgctgtgaggcgctggccgccgccgacctgcggggcgaagtggggcagatcccgctgccgacgctaatcatcgctggggaaagtgaccctgtcaccacggtcggtgacgctcatttcctgcagcagcagatccccgcctccgaggtggttgttctggcggcatcgcatctgtctaacattgaggcgccgaaaagctttacttcggcgctgctgagctttttccagggggaacgccatggatgataaacagcgctatcaggacgggatggcggtacggcgcaaagtattgggcgacgcccacgtcgaccgtacgctgcagcatctgacgccgttgaatgatgagtttcaggactttattacccgctatgcctggggcgagacctggacgcgtccggggctcgatcaccatacccgcagcatgatcactattgccatgctgatcgctctcaatcgcgaggcggagctgaagatgcatctgcgcgcgtcgtttaacaacggggtgacccgcgatgagctgaaagagctgatcatgcactctgcgctgtactgcgggctgccggcggccaatgccacgatgcatctggcgcagcaggtgtttgacgacatcgacgccgcgcagggttgagtcgtcgtccgagtcggattgcccggcagtcgttgtaggccgggtaaggcgccgatagattgccctccggcacagcgcttgccgggcctgggaagcgaagatcgcctgtagaccccgtaggccgggtaaggcgcagccgccacccggcgaaataacggcacaaccggaaatgtccctgttcgcactatgtgtggcaggaccacaacgtttggcagggctacaacttctatgttaattccgggcagattgcgctcccggttgatcttctgcgttatgtcacttatggcgcagggagcgcacagggggcggccagtcgccgccgccccctgtacccccgggctccggccagcaaaatcgccgctgcgcggtcccttcgacttatccctgcaggctgcgggtcgggccgaggcagcgtccctgcaaaacacggccctcagcccgcatccatgcgggctgccccggccttccgggaacgtctcagcgattttgaggccgccagcaccggcagtttcagtcgcgcaaatgggtaaatgagtgacaggcctcacgaacccctggccgggtaaggagctgccgccacccggcgaaatggcggcacaaccggaaatgtccctgttcgcactatgtttggcaggaccacaacgtttggcagggctacaacttctatgttaattccgggcagattgcgctcccggttgatcttctgcgttatgtttcgtatggcgcagggagcgcacagggggcggccagtcgccgccgccccctgtacccccgggctccggccagcaaaatcgccgctgcgcggtaccttcgacttatccctgcaggctgcgggtcgggccgaggcagcgtccctgcaaaacacggccctcagcccgcatccatgcgggctgccccggccttccgggaacgtctcagcgattttgaggccgccagcaccggcagtttcagtcgcgcaagtgggtaaatgagtgacaggccgcacgaacccctggccgggtaaggcgcagccgccacccggcagaaatgccgctacgttaacctttatttctccggctcctgcggcgcgacggccggggcggcgtaccaggcttcctgcggcaccactaccgccgcctttggctgcatcacaaagttcggcgacataatctgcacgccgaattcgttaaacacatcaataatgctgctatgcaatgcgttgcggccatccggcagcttggttgtggggagtaagcgcacctgcagctcatacgaggtgtaccagtcaagcaatcccagcttacgcaccaccggcgcaatttgctgatcgatccccggggtgcgtctcgccgccagctccagcagcgcatggacctgacgccacggcgtatcgtagccgatggtgacgctggtggtgaggttgactccaccgtcggcgctttcggcgctgagattaataattttcccgctcaccaccaccgcgttcgggacggtaacgatgtaattttcgcgggtgagaattttggtcgccagcacgccaatctcgctgacctgaccctcattatcggcgaggcggatccagtcgcctttgcgcagcgcccgagagtagatcagcaccaggccgctcatcgcatgggtcatcactccggttgacccgagggtgagcatcaggccgaagaacaggctaatgcctttgaaggcgagagagttggcgccgggaaggaacgggtaggcggcggagagggcaaacaaccagatgaccaccgagataagccgacgggtggcgctaacggtctccggatgaatgccgggaatctgaatgcggccggcggcgacctggtcgagaaccaccttcaccaggcgaatgataagccaggtgagaaggaaaataagcaccacgatcatcagccccggcagggaggcgacaatcgacagagagaggtggcggatcacccccagcgaccagtcgcccagcgattcgctccacacccgcgtccagggaaacaggctgaaggcccagctcagccagagataacaggccagcatgccgagaaggatgaccagcacagcatagagtcgaacttcaatattgccgagatagcgccgccagtgctgcggtatggcgctacgtttttcgaggatccgcagcaggaaaaaacgtcgcacccgccgccaggcgcggaaggcgccgtagtaaaacagcgccagcagcagcgccccggccagggctttaccggcggagatgaacagatagcggttgttgaactgctcctggaggctggtgcgctgggcttccatacgcgccagcacccgctgggctgcctggtcgagggttaaatcatcgccctcgtcgagatccgcctggctcagcagcagcaccggtttgccgttcatcagcaacagtctgcctggctgaccatagcggataaccggcacgacccgcagcggctggcgaatatcatcttcggtgaaggcgcgcagggcgctacgggtgcgcaaaacgcgctcttcgggcgtggtctggccaaaggtggcctgcaacatgacgacaggttggtggaaaatcgtgaccgtgcgtgcctgctcgcgcgcggttggctgctgtcgcggttcggcggccagcgccggctggagcaccagcagcgccagcgcccagaggataacgatgctcatcctgttcattgaggcacctgagataagaattattgttatttttcagcaaaaaacggagggcttgtagttgagcatagcctggtgcgaagtgaattcaagctggggaaacgcggacataaaaaagccgtcgcccaaacggcgacggcctgatatcagcgtcagaggatagcgttagccgtgctgtttacagcccgcgcactgcttattctggatctgctggaagaagtcgttgcctttatcatcgacgaggataaacgccggaaaatcttccacttcgattttccagatagcttccatccccagttccggataggccacgcactcgaggctcttgatactctgctgggcgagcactgccgccgggccgccgatgcttccaaggtagaagccgccgtgtttatggcaggcatcggtcacctgctggctgcggttgcctttcgccagcatcaccatgctcgcgccgtgggactgcagcagatcaacgtaagagtccatgcggccggcagtggttgggccgagggagccggaagcgtaaccggctggcgttttagccgggcccgcgtagtagatcgggtgatctttgacgtactgcggcagcgcctcgccgttgtcgataagctccttcagcttggcgtgggcgatgtcgcgggccacgataatagtgccgttaaggctcaggcgggtggagaccggatgtgccgacagctgcgccaggatctcgctcatcggctgattcaggttgatgcttaccacctcgccttcgccggcctgacgcagatgttcaggaatatattttcccggattgctctccagcttctcgatccagataccgtcgcggttaattttggctttgatattgcggtcggcggagcaggagacgcccatgccgatcgggcaggaggcgccgtggcgcggcagacggatcacccggatatcgtgggcgaagtatttcccgccaaactgcgcgccgaggccgaggttctgcgcttcctgcagcagctcctgctccagctgcacgtcgcggaacgcctgaccgtgttcgttgccttcggtcggcagaccgtcgtaatagcgggtcgaggccagtttgacggtcttcagcgtcgcttccgctgaggtgccgccgatcacaaacgcgatgtggtacggcgggcaggcggcggtgccgagagtgcgcatcttctcaacgaggtagtttttcagcttcgccggggtgatcagggccttggtctcctggtacagataggttttgttggcggaaccgccgcctttcgccatgcacaggaacttatattcttcaccgtcgacgctgtagagatcgatctgcgccggcaggttggtgccggtgttaacctctttatacatatccagcggcgcgttctgtgagtagcgcaggttatcttcggtataggtgttgtacaccccctgcgccagggcggcttcatcgccgccgccggtccagacgcgctggccttttttccccatgataatcgcggtgccggtatcctggcaggtcggcagcacgcccttggcggcaatttccgagttgcgcaggaactgcagggcgacatatttatcgttatcgctggcttccgggtcgagcaaaatcgaggcgacctgttgctgatgggagacgcgcagcataaaggcggcgtcgtggaaggcctgctgagcgagcagggtcagcgcctgcggctctactttcaggacctgctggccgtcaaattcggcgacggagacgtgctctttgctgagcagatagtattccgtatcgtcgtgcgccagcggaaacggatcctgataaacaaacggtttagtcgacatagtcacttactccataaagataaaaaccgccggggtagtcccggcggttatgaatcagaacatcatggacatccacggatagccaatcagcagcagggcggccaggaagatggcgccaaagatggtgccgaggcgccagtaatctttggtcggcaggtagccgctgccgtagtagattgggcttgggccagtaccgtacggggtgatgatccccatcacgcccagcgaggtgaccatcagcaggacaaacacttccatattcattcccgggatagtcgaggcaatggtcagcatggccggtagcagcgcggtggtgtgcgcggtggtgctggcaaacagatagtgcagcaggtagaacgccagcagcaggacgatggtcgccatccccggggagatgccgctcatcagcgcgccgccctctttacccagccaggcgataaagccggtggaggagaggccgtcggccagtgccaccagggtggcgaaccagacaaaggtgttccatgccgctttgttgttggtgatatcgctccaggagagcacgccggtccacagcatcagcacgataaccagcagggcagccagcgccggttcgatccagtcggcggcgaagatccacatcatcagcgcgaagcagacgaataccagcagcagaatttcattgcgcgacagtttgcccagtttttccagttcacgcgcggcccacagtggcacttcgttattgactttcacttccggcgggtagaaccagtaggccagcagcggcatagccagaatcagcaggatacccagcggcaggaaggcgatgaaccaggtgccccaggagatattgatgccaacaatgcttttgaccagcgccagggccagcaggttcggggccaaagccgacaggaacatcgagctggtaatacaggcggcggtgatcgctacccacatcagataggaaccgattttacgtgcgctcggatcgtttggctttgaaccgtacagcggcggcaggttagcgataatcgggtagatagtccccccgctgcgtgcggtgttagatggcgtaaacggcgccagcagcagatccgcgaaggtgatggcgtagccgagcgtcaggctgcgacggccaagatatttcaccagaatcagcgccaggcggcggccgaactgcgttttatcgtagccggcggcgaacatgaacgcgccgaagataagccacacggtggagttgccgaagccgctcaccgcccacttaaaggaggcgccagccattttgaagcctggcgcggccatctgatccgggctgaacagcagccactggctgcacagggcaataactaccacgccggtgataccgataacggcgccgggcagcggttcaaaaatcaacccgacgatcaccccgacaaagatagcgaagtagtgccaggcgtacggcggcaggccttcggggaccgggacgaacaataacagcacggcaacgataatcggcagcgccatcatcaggagaggttttttattcgcagtcgttggcttgactgcaccggcaggcggtatggttgtctttttctctttcataatgagtatctgcaagttgttgaaaataacgtttacgccagcgtcttgctcagtggtttctttaattacaaaagttactttagtttttattttgcgtttctgagtatcgatagggcgcttatttaacgcgttttatgaggcgttaaattaaatttgttggttatttatatattgcgctttcaatggccgttgcaattgatcaagatcaagaaaagccggtgatttcactatttttttattatcagtataaccctatatgatgaggtgttattttggcgaaaatatcgatagatgttaaaagaaaaatgaataataaatgctgaaattatattcacttttagtatctttatgattttattgtatttttgcggtttttcttgtcattgtttatgttaacaaaagtatcctaattgttatcacgcatttgtattatgtaaatgctatttattattttaataatacaatagaggtagcgatgttattgctggggttaaatagttttataactaacgtaattggtttagtaattaaaaaacgcgttatattattggcatgacaacaggaattaaaaaaccaaaaccattaatgattccgtcacctcattctgagcttttaatattttaaaatctggagcgtaacttatgaccagtaacgaacgtattttgcagccatttactttaccaaatggtaccgagctgaaaaaccgtttgctcatggcgccaatgaccacctgcaccggttatttcgatggtactgtcaccagcgagctggtggagtactaccgcgcgcgcgccggaagcatcggtaccattattgtcgagtgctgctttattgatgactacggtctggccttcccgggcgcgatcggcatcgataatgatgaaaaaattgccggcctggcgaaaatcgctgaggcgatcaaagccgagggttcaaaagcgattctgcagatctaccacggcggccgtatggtcgacccgcagctgatcgggggcgccagccggtggcgccgagcgctattgccgcgccgcgtgagggcgccgccatgccgcgggcgctgagcggagaagaagtggaagggatgatcgccaagtttggcgacggcgttcgtcgcgccattctcgccggtttcgacggggtcgaaattcacggcgccaacacctatctcattcagcagttctattcgccgaactccaaccagcgcgatgacgagtggggcggtagccgcgacaaccgcgcccgtttcccactggcggtgctggatattacccacaaaatggcccgccagtatgctgacgatgcctttatcatcggctatcgcttctcgccggaggagatggaggtcccggggatccgctttgacgacaccatgtatctgctggaaaagctggccgcccgcggtgtcgactatctgcacttctcggtgggtgccaccctgcgtccgtctatcgtcgataccagcgacccgacgccgctgatcgagaaatactgcgcgatgcgctctgacaccctcgcccaggtgccggtgatgggcgtcggcggggtggtgaacgccgctgatgccgagcagggcctcgatcatggttatgacctgatcgccgtgggccgcgcctgcatcgcctatccggactgggcgtcacgtatcgccgccggcgaagagctggagctgtttatcgacagcacccagcgtgaagcgctgcacattccggaaccgctatggcgtttctcgctggtggaagcgatgatccgcgacatgagcatgggcgacgccaaatttaaaccggggatgtttgttgagaccgtccacgatgacgccaatgagctggtgatcaacgtcagcctcgaaaatgaccatattgccgatatcgaactggcggcgagcccggtccagaccgtggaattcaccaccagctttgaagagatccgcgaacgtattctcaccgccaataccccgcacgtcgatgccatttccggggccaccagccagagcgaggcggtgaaaaaagcggtcgccaaagcgatgctgaaatcgagtaaagcgctggcggcggaagagggcggcaatgacgccgcgccgaaaagctatgatgtggtggtagtcggcagcggcggcgccggtctggcggcagccattcaggcccacgacgaaggggccagcgtgctgatcgttgaaaaaatgccaaccatcggcgggaacaccatcaaggcttccgccgggatgaacgccgcggaaacccgcttccagcgcgtgaaaggtatcgaagacagtaaggagttgttctatcaggaaaccctgaagggcggccacaacaaaaacaacccgcagctgctgcgccgtttcgttgaaaacgcgccgcaagccattgagtggctggcggaccggggcattatgctcaacgacattaccaccaccggtgggatgagcattgaccgtacccaccgtccgcgcgacgggtcagcggtcggcggctatctgattagcggcctggtgcgcaacatcaccaaacgcggtattgacgtcctgctggatacctcggtggaagagatcctgatgcgcggggatgaggttagcggtgtacgtctgatcaacgacgaaaaagaggtcattgaagtacagaccaaaagcatcgtagtggccaccggcggcttcagcgctaacagcgcgatggtcgtgaagtatcgtcctgaccttgaaggcttcgtcaccactaaccacaaaggggctaccgggagcggtatcgcgttgctggaacgcatcggcgccggcaccgtggacatgggcgaaattcagattcacccgaccgtcgagcagcagacctcgtatctgatttccgaatcgattcgcggcggcggcgctattctcgttaaccagcaggggaaccgcttcttcaacgagatggagacccgcgataaagtctcggcggcgattatcgctctgccggaacactatgcttacatcgtcttcgacgagcatgtgcgggcgaaaaacaaagctgccgacgagtacatcgccaaaggcttcgtcaccagcgccagctcaccgcgggaactggcggagaaactggggatggattaccatgccttcctcgccaccctcgaatgctacaacggggcggtggaaaaacagcatgatgaacagtttggccggaccaccgcgctgcgcgcgccgattaacgaaggcccgttccacgccattcgcatcgcacccggggtgcaccacaccatgggcggcgtgaccattaataccgatggcgaagtgctgaatgtggcgcagcagccgattcgcggcgcctacgccgccggtgaagtggtgggcgggatccacggcggcaaccgtatcggcggtaacgcggtggcggatatcatcatcttcggtaccctcgcgggccatcaggcggcgaaacgtgccagaggataacctgtaaccttgctcctgccgggttggcgctttcgccgcccggcttgccccttctaaggagagcccgatgtccgataaccgcgtctatagctactccgccgtgttgatgggctcgcccatcctgctcaaactctgttcccacgatgaggcgatggcctcccgcgttttccagcttatcaagcgctacgaagacctgcttaccgttaaccgcgccgagtcgcaggtgatggatatcaaccatgccgccgggcgtcatccggtcaccgttagccgaccggtctttcagctgatccagtgcgccaaagcagccagcatggtgcgcgacagcgcctttaacctcgccatcggcccgctggtgaagctgtggcgaattggttttcacgggcacagcgtgcctgacgcggctgatatcagagcccgactggcgctgacccgcccacaggaggtgatccttgatgaggcaacctgcagcgtgtttctgcaacagccggggatggagctggatctcggggcgatcgccaaaggctatatcgctgaccgcgtgcgcgattttctccgtcagcagcaggtggagaaggcgctgatcaacctcggcggcaatgtgcataccctcggcgaatgggccattggcctgaaaaaaccatttgccgacgcgcaggcgctgatcggttccctgacggtcaacgggcaatcggtagtcacctccgggacctacgagcgctatttcgaacaggatggcaaacgctggcaccatattctcgacccgcgcagcggttatccgctggacaacgaactcgacagcgtgacggtcatttccgcggattctttagacggcgacatctggaccacgctgctgttcggcctcggcgtggagaagggctgcgcagcgctgcgtcagcggcaggatatcgacgcgattttcgttaccaaaaatcgcgacattattctctcatcgccgcagcggctgcgttttgcgtcgctggacagcggctatcgggttattgactgtactgcttaagcaaactgtactgttcggcgaccaggcggtagcgatagaccggccgcccggtagcgccgtagtggatagtggtatagagaatattgatctgcgccagccaaatcagatatttgcggcaggaaacgcgggagatattcaccgccgccgccagctcatcggtagagaattcgacatccggatgggcgtcaatccactggcagagtgtgcgcagcgtttgcgcggttaaccctttaggcagcttgcgcgcgtcgctggcctccggcgcgccgccgtgcagcaggcggtcgacatcggcctgttcgtaatagggctggccggttattagtttgcgcttctcccgccaggtggtgagcgcctcttcaaagcgcggaaactggaagggtttaatcaggtaatcgaccaccccgtaatgcatcgcggtctgtaccgtggcggcatccgccgccgaggtaatcatgataacgtcgatggcgcgccccgactcgcggatggttggcaggagatcgagcccgctgtcctgctgcatgtagacatccagcagcaccagatcgatctcctgctgcggatcgttaatcatctcctgggcctgactgagcgtcgaagcgctcgcgctgcaacgaaagccgggaacccttgccacgtacaggcgattcagttcggccaccatggcatcatcgtcaacaattaaaacatttatcacgcaggtttccttttactatcccaggggagatgaacaaaaaattgggtaaatacgccgggttccgattcgacggcgagggtgccgccgagctcgcgcaactgctggttagcaagaaacagcccgacgccgcgattctcgcctttggtggagaagcctttgttaaagatagcgtcgatgttgttctccgggatccccggcccatcgtcgctcacttcaccgcttagccagccgtcctggtagtgcagcagcaggccgatctcaccctccgcctggccgctcatggcgtccagcgcgttctcaataaggttgcccagcaccgtcaccagcaccgtgacctgtttctcgttcggacaatccggcaccaggctctcctccgccagcgtcagggtaaagccgcactctgtggcgcgctgaattttacttatcaggaagccggccaccaccggggatttaatgcggtgctgaatgtcgccgatgtccgcctggtagcggtgggcggtctgcagcacgtattcctcgagtttgccgtagcttttcatattcagcagaccgaggatcacgtgcaatttattcataaactcatgggaggtggtgcgcagggcatccacatagctcatcatgccgtccagtcgctgcagcaattggctgacctcagttttatcgcggaaggtacagatggcgccgaccaccgcaccctggctgcgaatgggcactgtattgccgatcagcagcagaccattgcaccccagttcgcggtcgtacattggctcgccgctctgcagtacggtctgcagatcgtcgagcagggggctgtgaacgagagtcttatccgggccggaaaagaggatctcttccgccgcggagttgatgagatttacctcgccatgggcatcgaccgccaccaccccctccttgagggcgtgaagcatggcctgacgctgctgaaactgggtggatatttcgtgcggctccagccccagcagcacgcgcttcaggccgcgaaccaggctccaggtgcccagcgcgcagaccagcgcgctgaacaggatggtcagcagcacgtcccaacggctgttggcgatctgttcgtccactttactcagtgaaatgccgaccaccaccacgccgatttgctgatgccgttcgttgaacaccggcgtaaacacccgtagcgccggggccagcaccccgtggttgatggcgacattctcttttccctgcagcgtcggctgaatatcgtggccgatgaacggtttgccgatgattgagctgtccggatgcgaatagcgaataccctgcatatcggtgacgatagcgtacaacaggtcgttgcggcgggtaatggcctgcgccagcggctgaatgatctgctgctgcgggggcgcctccagtccgcgcttcacctgcggcatatcggccatggtgcgcgccaccgccagcgcggtctctttcagaccgtcgcgggtggcgttgctgatctgcatataccacaaggcatacaccagcagcagcacggcgccgatgacgctgccgatcatcaaggacacggcggtgctcagctttaacggtaaggcgcgttggcgaacgcgaggcgggtgctctgaagccttcatgacgaccccgggtagattcagtgaaagattattatcgccgatagcgcggcatacataaagccgtgtaatcaaagcaaaaggccgcttttgctacggcagactcctcctgcgcgcggtacactgcggcttttcgccacaggcttaagggagacactatggaactggcttttctggtccgggatatcctccggcagcggcacgttgaacgtctggcgcagcatcgtgaacaggataatgaagcggaagcagagtgggagatcgcccgctggcggcatcgcagcggggtggtgatccagcgccgctatgagctcgagatcgcgcagcaggatagcgcatcctgcccggagtgctggattgactggcaggttatcgacgccgccggccaggagatcaacccgatgcgcaaacagttttataacctttgccagcaatccttctggctggctatgcaggcgggtggtgaagatgagacctcagacagaattgctcagataaccgacaatcacccgtaaacgcgcgttggggacggtaaactgtgaccccgacggcggtaaagcgcagaacattccacttatagtggcggcagaggttaaatagtcctgatgaatataaggatatgcatcaggccgctgattttgccgagatgcgctttttctgtcgtaaatggaggttgttatgagcagttcgctaaccgcgtcaatgcaggctcgtcgtcacccggagaccacccacatcgatcgcctcgccaccgccgatatgctggcgatgctgcatcaggatgataagcagatatcggaggcggtcggcgcctgtctgccggatatcgcccggctgattgatatcgccaccgcgacgataagccggggagggcgcctggtcattattggcgccggcgcttcgggccggacgaccattgaggcggtcagcgactattcgccggaaggtaaacacgcgctggtggggctgattgctggtgggcagacggcggcgatggccgagcgggagactgcggcgaataattatgacctgggcgcctttgagctgcagtcgctggacttcagcaaccgcgatatgctgctggcgctgaccgtcagcggcaagacgccatgggtgtggggggcgatgcgccacgcctggtcgctgggcgccccgatagcggtcatcacccagcagccgaccagcgaggcggcgcagctggcggatatcattattgctccgcagaccgggccggaggcggtggcggggttagccaatccgaaggctcagttggcccagaggcagatcgtcaatatgctgacaaccggactcgccatccgtgacggtcgggtgtacagcaatttgcgggtggacgtgcaggctgacaattcgcactgggcggagcggcagatagcgattgtgatggcggccaccgattgcacgcgcagtgaagcaaaggccgccctggccagctgtcatcagcactgccgcaccgcgatcctgatgctgctcagcgggcttgacgcctggcacgcgcgggagctgctaaccaaacatcacgatcatctgcgtctcgccctgcgtgaagcccagcgtagcgctgtcactcccgcccagtaatcccttctctgccaggcgcgcgatgagcatgcgcgcctggacttttgtaattaaagaaattcttaacttttattttacccggcaatagatattgaattttcgaccttatttttttatccgtcttcgctctatttttaaaattgattttttaagttaaataactgtttggtttaaaatgcgagagtgtaaatgatattttaaaataaagtaaaagtgcgttaatatgctgcctcttatgaccgtgtgctacgtgataattctattatgcctgcaatgaaaaaaacgattatttccttaaccgcattagcgatgttggtcagcgcggcgacgcatgctgaagcggatacctcgaaaaaaaccgacttcctgctgattggcggcgggatcatgagcgcctcgctcggcacctggctgcaggcgctgcagccggactgggatctgaccatggtggagaaactggacggcgtggcgctggagtcttccaacggctggaataatgccggtactggccactcggcgaatatggagctgaactatacgccggagcgggcggacgggtcgattgacgtcagcaaagcgctcgatattaacgagcaatttatgatttcccgtcagttctggtcggcacaggtgaaacgcggtattttgcacgatccgcactcgtttattaattccacgccgcatatgagcttcgtctggggtgataatgtggattatctgcagaagcgttataacgcgctgcagcagaccaccttattccaggggatgaaattctccaccgatcacgcgcaaattaaacagtgggcgccgctggtgatggaaggccgcgatccgcagcagaaagtggcagccacctggacgccggtgggtaccgatgtcaactacggcgaaatcactcgccagctgatcggcagcctgaagaaaaataaccacttcaccctgcagacctcctctgaggtaacggatttcaaacgtaatgccgacaactcctggcacgtaacgattaagaatgtgcagagcggggaagcgcagactattgacgccaaatacgtctttatcggcgccggcggcggcgcgttgaagctgctgcaaaaaaccggtattccggaagcggacaactatgccggcttcccggtgggcggctcgttcctgatgaccgagatcccggcggtcactgcgcagcacctggagaaagtgtatggccaggcttcagtcggcgcgccgccgatgtcggtgccgcaccttgatgcacgttacctcgacggtaagcgcgtggtgctgttcgggccattcgccaccttctcgaccaagttcctgaaaaatggttcgttcttcgatctgctcagcactaccaccaccaataacgtgctgccgatgacccacgtcggtctcgacaacttcgatctggtgaaatacctggttagccaggtgatgctcagcgatgatgaccgtttcgctgcgctgaaagagtactacccggacgcgcgtaaagaagactggaaactgatccaggccggccagcgcgtccagatcatcaagaaagacgcagagaagggcggcgtgctgaagctcggtaccgaagtggtggtcgatcagcagaaaaccatttccgcgctgctcggcgcgtcgccgggcgcttccaccgccgcgccgatcaccctgaacgtgctcaagcagatgttcccgcagcagtttaactcgccggagtggcagagccgcattcacgctattgtgccgagctacggccagaagctgaacggtaacgtggcgctgacccagcaggtttgggatgacaccgctgcgaccctgcagctgacgaaaccgccggtgatccagatgccagcggctgcgcctaccgcgaccgccaagccggcagagacgccgcgcgaggcctcgccgcagcacgatatggcactgtaaaagcaaactcgacagtgaacaaaagggaagaccatggtcttcccttttttgcgttatttaccggctgaggccgcgcgctgcctgcaactttggcgtcataaaagatatactggtttgaattgaaataagaaaattaaaccaggagtgtggaagggccatgcaagaggatattaaccaggagatcaccttccgcaagctgtcggtctttatgatgtttatggcgaaaggtaatatcgccagaaccgccgaagcgatgaaactcagcagcgtcagcgttcaccgcgcgctgcataccctggaagagggggtgggctgcccgctgtttgtccacaaagggcgcaacctgctgccgctgcaggcggcgtggacgctgcttgaatactgccaggatgtgataagtctgatgaaccgcgggctcgaggcgacgcgcaaggttgcaggcgtcggtcaggggcggttgcgcatcggtaccctctattctctgaccctggaaaccgttccgcgcatcattatggggatgaagctgcgtcgcccggagctggagctggacctgacgatgggttcaaatcagatgctgctggatatgctggaagacgatgccctcgatgccatcctgatcgccaccaacgaaggggagttcaataataccgctttcgacgtggtgccgctgtttgaggacgatatttttctcgccgccccggcgaccgaacggctggatgcctcacggctcgccgatctgcgcgattacgccgaccgcaagtttgtttcgctggcggaggggttcgccacctatgccggattccgggaagcattccacatcgccggcttcgagccggagatcgtcacccgggtgaatgatattttctcgatgattagcctggtgcaggctggcgtcggttttgccctgctgccggggcggatgaagaaagtgtatgagaaggatgtacagctgctaaagctggcggaaccctaccagatgcgccagctgatctctatcgtctattcgcaccatcgcgaacgcgatgccgacctgctggcgctggcagcggaaggacggatgtacgcccgcagtattaatcgctaagccgctgcgccagatggcgggcgacgtccaggccgctgcgctccagcgcaatggtctccccgcgccagcccgcctggcgggtcaggcaggtgagcacccccccggggggcatctcaatggctaagcgcgcatcgcgctcatcggcggcgaccatcgcctcctgccagtggaccgggcgcgccatgttcatcgccagatcgtcggcgatccgctgcggatcccacagcacgcgcgccgtcgagccgcttaaataggcgcaccgtgggcgccttaagctggcgccggcaaaagctttcgccagctcagcggcgggtttatccagcagcgcgcagtgcgacggcacgctgaccgccagccgctgggctttactggcgccagcccgcagcgccagctgcgccacctcggccattgcctcatcacggcccgcaatcacgaactgcgtttcggcgttcaggttggcgagataaacctcgtggccctgcatcagcgcctcaacccgcgggcgggtcaggcccataatcgccgtcagtccgtaaccttcaggatacgcctgttccattaagtccccgcgcagggccaccagccgcaacgcgctggcgaaatcgagcgcgccggcaatcaccgcggccggaaacgcgccgatggacaggccgctgaccatctgcggatccacgccctgacgctgtagctcgcgcgcccaggcgacaccggcgatcagcagacagagctggaccgcacgggtgtgttgtagcgcatcggcgctatcgagagtagcgacttcatcccccagcacggcgcgcgcctgggtgaggattgcctcgcgatcggggatcatcgccagcatgccgggacgctggccgccctgaccgggaaaggtaaataaaatcttcattattcctccctgtgccacggcgtcgcggttaagcgcgcgccgcgggacgttttcagcagcgcgcgcccgtcgcgcagccattcattaagggcgaaggcgccgtacggcgtttcgacctgggtatcagcgcggcatgggagttgggccacccgggtctgccattccagcagcgcctcgcggtccaacggctgtggcgcgcggatcagcagatccagatcgctggccgcatgcagcaccgggatctcggttgccagcgcgtagccggtactgccggtgacgccccagccccagggccagcggtgtaaggtgagggcgatagccccctggaccggcggctgcgagacaaaaggcgaatggagtaagacctcacgatcaacaagcatctccggggtgacgctgcgcacgatattgcgcgcctgtacccagccggcggcgcgctgctcgcgcttcatgccccgcaccccaaccgggacgcgggcctggtcgtcaacgtcgcgcctcaccaccaccggcagcgcggctcgccactgctgagccacccacggctcggcaatatcttccagggcgctggcgtggtttaaccaaactagatcatggggacgcggcgttgctgacatggtttacagtcctgaagtcaaagagataaacagcggtagcgacaggatacacagaaccgagctcaacagcagcacggcttcagcatccggagactggacgccgaagcggttgccgaagaccacgccaaagaagccggcggccagggcaatcatcaggatcgcggtaatggcgatagaaccgtgcagcccaagtaacatcaccagaccccaggcaataaacggctgcaccagcagtttcacgatggttgatgtagcgatcagcgcattgagctgcagtttacgcgccgacaggatcaccccggtgaggaacagcgcggcggcggtggcggccaggcccagcggtttgatcgacgccagcagcaggtccggcattttaatgccgatcgcggaaagcaccaccccaagcagcgggccccagacgatcggttttttcaccgaacgccacatcagcaccggcagcatcgccagcgtagaaccgctgttttctcccgcggcgcgggctttttcacgttccagaatcagcaggcagaacggggtcatcagcaccgagccgcaggcgatagagaccgctaccgacagtgaggttgacgcgccttcacccagcacgctgccgaggatcggcagacctaacgcggcatagtttggcagggcgacggtgagggtcagcaccgcggcatcctgcggcgtgcgtttgaacacgctggtggcgaggaagtagatcgcggcataggtgatccacatcgcgccggtcaacaccagcaccagcggcgactgggcgacgatcccggcccacggcgtttgtaccgtcgcgctaaacagcgtggcgggtaaggcaaaatccattacaaaaatattaagcagcgagacgtttttgttatctaccatcccggccttaccggcccagaagcccagcagcatgataacgaaaatcggggcaagagcatgaataatcacataagtcataaatcacctgtaaataagatagagtactggcgcgattgttattttttctaaaagccgtccctacccggcgcggttattacgcgctccgggggacggcttccggcaggttttcttctactacttacgtacgaacgtcttaccagctggcgcgcatgcgatcgcgaaccagttgcgagctgcggcggttttccgcgcccaggcggcacttcagtgaggcatcggtgcgcgcatcagcgatggcgtcgcgcagcgtgttgctgaccaacgacagatcgtgatcgtcaggggcatccggattattaatatccagcagggcggagagcaggccgagcgtcgcatagttgctgacgtcgtaggccattggcggaatggtagccgccagtttctccagcgcctctacggtacgcagcgtaatgcgcgccgccgattctttccccatcgcgtggaccagcacgccgctatcgttaaaggcgatcaggcggttggcctggtagccgtgggccagaaacgccccggacatcgctttgccgacgatcaggccaattaccgggtggccggccaaacgggctttggcataagcgccagccgccccggccagcgcctggtgaatgccgaaagcttcttcgcggcggccataggcctggcttggcacatcgatcacggcgacgatcggccgtttgactggctggtcggcgtcggcggcgatggtttcattaaccactttcgccagcgtccagccttccagcaggccgacttcgccgccggcggcgcgcgggtagtggttgttagcatccgggaccacggcgataaaacgcacgttttcgccattaatctggccgtctgccacctggacggaagggcacaggccgctcatcagcggcacgtcgggcgccagtttgttcagccacagcgcggcgcggtttgggaactgactcattatttatcctcccgggcaaaaagctgtttaatctgcgcggtatccgcctgctggcgggtgtcgaactggctcaagcgacgcagataatcgtcatagttgtcgctgcggtgctgtaccggtacgcctttggcgatcgcctcattcattgcggttttaacggcgttaacgccatcgttaaccagcgcgtcgaccagtccgctggcggcgcgaatttcgccgccggtcatgctccagataaacggccggttgcgggagtcgtactcttcaatgccggcttcctgctcgataacctgcgggccgttgagaccgagacgggcttcacgagtgacgataaggtaactgcacagcgcggcggcgatagacataccgccaaagcagccgacggtgccggcgatgatgccgaccactggggtgtagcggcgcaggtcgacaatcgcggcgtgaatatcggcgatggcggccagaccgaggttggcctcctgcagacgtacgccgccggtttcgaggcacagcaccgcctgcgtcgggataccgttgcggttatcttccgccgccagctccagcgcggcggccattttggcgccggacacttcgcccatactgccgccctggaaggtgccctcgatggcaatcaccaccgcaggctggccgttgatcgtgcctttggcgaccaccataccgtcatcggattgcgggacgatgccctgggcgccgagccacggcgacataataccgtcaaacggatccagcagttcgcggcagctgccgtcgtccagcagggcgtgggcgcgttcgcgagcgcgcagttcgataaagctgcgatcgttacgcatgagcggcctcctcaaaaacctgttcaatacgaatacgggcgacgcccggcgtggcgccgaagtcgtggataatcaactgcccggcgggcaggccgttgatcaggttcaacctgtcgaacagcgcctgccagcgcgcctggctgttatccactgaggtgatgatctgtacgttgagcgtggcgctctgtgcggcggtataaagtacttccatatcgcctgaacccacgactcctgccagcgctcggccgctcagggcgcggctggcaggaaatgacaatgtaatctgttccataacatcctctgaatgcgttagccggcaactctgtcgagaaacagggtggcggcaaggagatcggcggcgcctcccggcgaggcgtttagcgccagcatgattgcgtccaggcgggccagggcggcgcgcccggcgaaactggcgcaaccgccagccgccagcacctcacaagcgccttgctgcatggcctgcagcccggccataccggcgcgcgacagcacgcaggtatcgctcagcgaggtcatgatggccatcagcgcatcaagctgcgcctgcggctcactggcgcctcgcgcccggctgtgctgcagttgcggcagcgccaggcgggtgatatgcgggaaaccacactgcgcttcctcgcgggcgcctggcacctgccagcggcggctggcgcgaagccctttactaaagcttttcggcgcgaagccgtcgggcaggcgggcgagggcggcggcggcgtcggcgatcgcctgtgactgaccctctccacccaacatcgccaccgcgctgaccagcaggcctagcgcccagatagcgccgcggtgggtgttaaccccacccgtcgccagcatcatctgcgcttcgccttcgcggccaaggcggccgacggtttcgcgcagcgcgatgtccgccgggcgacgccagctttgctcggccagcgcgtgaaaggtcggctgcaggctgcgggcggagcgctccatcagcgccagattcaggtcctgatgcgcgccgttgccgcggctatccaccagacccggtttcgggctcagacgggcttcgtcaatcagacaggcgctggcggtatgcgccagccagctgacgcggctttctgcgtgcaggggggagagatttttcattaccagctccggaattttgccggtgggttgtacagtccgtcggaccactccaccagctcggcgacgctgccggcggccagcagggagcgggtggcatcgctgcggcgaatcccgagatcttccgggtagaccactttgccgctctgacgcagcgcggcgacgcgtttggcgtccacaccaaggccgatatcggtgatcccggccaccgcggcgaccatcgcccggcgctcttcaaggctctccgcacggtacaggtaggcgataccctcttcggtcaggacgtgggtgacgtcatcaccataaatcatcaccggcgccagcggcatgccggaggttttcgccacctcaactgcatccagcgtctcaacgaaggttggtttcacgccggcctggaaggtttcgaccatctgcaccaccagctttttcccgcgctgcatcgggtccggctcggtgatcatattgagccatgccggggtggcgtggcggcgaccgtgcgggtcgtggcccatgttcggcgcgccgccgaagccggaaagacggccgcgggtgacggtcgaggagttagccagaccatccacctgcagggttgaaccaatgaacatatctaccgcgtactggcccgccagctggcagaaggcgcggttagagcgcatcgagccatccgggccggtaaagaagatatccgggcgggcgcggatgtactcttccatccccagttcgccgccgaagcagtgcacgctctccacccagccgctctcgatggccgggattaaggttggatgcggattcagggtccagtgtttacagattttgcctttcaggccgagctgctcgccataggtcggcaacagcaactcgatggcggcggtattaaagccgataccgtggttaagcgactgcacctgatgttccgcatagatgcccttgatcgccatcatcgccatcagtatgtgttcttgcttaatcaggcgcggatcgcgggtgaagagcggttcgataaagaacggcttgtcggcaaccaccacgtaatcgatccacgagccgggaatatcgacgcgcggcagatcgcattcgtcgtccaccagttcgttgacctgggctatcacaatgccgtcgtggaaggcggcggcttccaccagcgccggggtatcttcggtactcggtccggtatacaggttgcctttgcggtcagctttatagccggcaatcagcgcgacgtttggcgacagatcgacgtacaggcgcgagtagagttcaatataggtgtggatggcgccgatttcgagcaggccatcttccagtagttgcgaaatgcgcaggctctgggtgccggagaaagagaaatccagcttgcgggcaatacctttttcaaacaggtccagatgctcgctgcgcccgacgctgggcataatcatatgcaggtcgtggattttttgcggattaacttccgccagcatgcgcgagaggaaatcggcctgtttctggttgttgccttccagcacaacccggtcgccgggggcgagcaggttttccagtacgctgaccaactggtcagtcgggatgaccttacctggcatgttcgcctcggccagccgccgctgtttttccgttcggcgacggttccagacccgccccgtcgtttgttcggcattcattaataacctcctgattcgacaaatcgttttgtttgtcctggtggagattagtgtgcgacgcgaggctatgagcatcaattaagcgcggtggccgatcgttagcatcagagtaacgattccgccgcaacgtttgtgatgcggatcaataatacataaggcgtagtggtctacggagagagtgtagggcagggagcaggccggcgaagcgccggcctgcggaaggactactgtttactaacatcgcttaataagaaagcgatactctgcccgccgctggtctgctcgagggcaattttgacgataatcgtcaacggcaccgagagcagcatgccaaccggacccagcaaccatccccagaagattaaggacaggaataccaccagcgtcgagaggcccagcccgcgtcccatgatacgaggttcgagaatattgccgaataccaggttgacgatcaggtagccggccagcactaccagcgcctcgtacagaccaccgaacaccagcacctgcaggatcggcggaatggccgccagcacggaaccgatattgggaatatagttaagcgcgaaggccagtagcccccacataaaggcgaagcgcacatccagcagcaccagcatgccccagaccaccaggccggtgatcaggcttatcgcagttttcagcaccagataatgcgatacgctgtcgatggcccgctggatggcgcccatgccttctactggtctggacattaactgctgcagcttagcgggaagctgcggcacctccagcagcataaacaccaccgtcagcagcagcagaaaaatggaggacatggcgttcgacagctgagtgagcaggctggtgaccagggtcattacggcgttagggtcgatgtacttattgagctcgaccaccgaaacggtgaatcccatacgctgcagccagggcgcgatggtttgcatcggctcatagagatagttgcgatactgcggcagggtgcgcgccagctcgttgagcgaggtccccagcgaggccagcagcacaatggctaacataacaatcaggccaatcagtagcgagatcgccagcacgcgcggcacccggcagcggaccaggagctggaccagaggattgatgatcaccgccagaaaaagcgccaggataaacgggacgattatgtccgccgcaaagcgaatgccggtaaggatgatcaccagcatgcccaacatgatgaccatctttaatccgttaagtgtaataatgggtttagccataggatcccgacctcaaacttccttgcctattaacaggttgcgttacattagcataatgacgcttttttgcagaacaaacgcattgaagaaaaaccgcggcgtaaagaattgcaaagtctttgaattaaatgtagcactatgctacaaatctacctgtgtttaactactgaggacaattttcatccgcaccggacgagaagcaacaccgcggataattgtaattttatggacaatcagttcaggatgtatattttaaatcaccccgcagtatccctcactttttcccgttttgccggcgaacagcactggcattcggcgctatagtcaccttctttctgcctgagctggcgccaagcgcacagcgatatctacgtcagaaattttcctgtttacgtctcgcgtaaacggtaatggattatattctcaagcaggagaagggatcatgttttattggattttattagctttagcaattattgctgaaattaccggcaccttgtctatgaaatgggcaagcgtgagcggcgggcacaccggctttattttaatgctggccatgattgccctgtcatatatttttcttgcctttgcggttaaaaagattgccctcggtgtggcctatgcgttgtgggaagggatcggtattttactgattaccctgttcagcgtgctgctgtttgatgagagtctgtccctgctgaaaatagccggcttgaccaccctggtgatagggatcgtcttaattaagtccggcacccagaaaaaagcgtcttccaagcaggaggtggcccatgcagcagtttgagtggatccacgccgcctggctggcaatcgccattgtgctggaaattattgccaacgtctttttgaagttttccgacggcttccgccgcaagatctacggcatcctgtccctggcggcagtattgggcgcgttcagcgccctgtcgcaggcggttaaagggatcgatctctcggtcgcctatgcgctgtggggcggcttcggtatcgcggcgaccatcgccgccggctgggtgctgtttggtcagcgtctgaataacaaaggctgggcgggggttatcctgctggtagccggcatggtgttaattaaactcgcctgacgtctcgccgcctgcaaagccaggcggcaaacggaaacttccttcacgcctggccccgctgtaattgtgtcaggtgacgctgagggctgcgcaggttcactgctttcggctggcggaaaatcatttccgccaggacgatgtcaataatgatattcttcatcggcctcggtccattactcaccggcaagcgcctccagcttatcgcgaaagccagtcaccgcaatggcgcgattgtccgcccgccagcgatcctgcgggccgggggccgaactctgcacggcgatcacctgccagccgtcctccgttttcagcagcagcggcgagccgctgtcgccaggcagggtgtcacactgatgcgacagtacgctggtttgcgcccaccctgtcacgatgcaatcctggtggctgtaaagattatcgagatgatcttcaggatagccagactgggtaactttacggtccgccgccttcagcgcggcggtgagatcggccttgctgcccggaaagagcgggatcggcgtaatgccagacggagcatagcgcagcacgatcagaccaaaatcggacggcgctgcagcggaagggacaatccagccgtcgccatcggctttcaggcgtctgcctaagctgggatcgactcgcccgtcaatgccgtggatctcatagacccagttgcccttgcgggaaataaagcgcagggcgaccgctttgtccggcttgccgcgcgggggcgttaacagacagtggcccgcggtcagcgccagatgcggagagatgagcgtcgccgtacacagattgccgctggcggtttccagctggccaatcgcgtcccacggactctcctcggggcggttcaccgctttgcggtcatcgtgaccgaaaaacaacgtcttaatatctttggcgctcagtccgctatcatcggcatgtgcgcccagaggtaacagataaaatgaacacagtaataacagaacgtctctacgcatatcactctctggggaggctatgatgtctattgacagtagcaggagatttaagtttttgaaagtaaacaataattctaaacaggccaaaccgtataccacatcagcgcgcggtggggtctggcgctggtaaaacctcctgatttcaagcggttaataccagtgttctgcttgtgctatttcctcagaaagtggcgtcttgcgcaacaagattcatgtatcagaacgtactgaattcggttaataatgcagcaattcatccgtgggattattcctggtttgtcagcataatgcccaaaaataatacttttacccaccagaacttcaccggaattcgcacttctttacgcctctcgtaattattttcaatgcgaaacattttctcactgaaaacgttgttaccgtcgccctgccgttgagtaaatagagaggtagtaccggcgatgatagcctgaactctatttcccctgcgttcggagggcttatgtctaaaaaaggtattcgcgcactggtttatgtttccctggtctcagtcgctatctggggcgcgaccggctatctggtgatggaagccgtgcgtgcattgtgatgggcgcgccacccggcaagggccaggcgtgcgacatattacgactaacatgtctggcgtcttctggcgccggacttttttttgcgccgcagagagtcacaggataatgggacgcggggagcgggtcagcgatagccgcacggtattcattttaatgaaaagctggtagaagcagcaaaatgcgagcgcgggataaataattaagagaggaaaaaacgggttgcaaccactgcgcatataattagcaggatcaggatgagctcaaaacgatagcgccgcagcatagtgctctccagaaaaaacggcgctgaaacagcgccgattattaagaaggttggttcgccgggaggaattatgctgccggctgtgcagtcggtttagcggcctggtgtttagtggttttgtggtgttttttcgctgcctgcgctttctgggctgccggtttagccgcagctttgtgatgctttttcgccgcctgagctttctgcggagcagctggtttagctgctacttttttgtgttttttagcggcctgggctttctgagcagcggctggtttagcttctgcttttttgtgttttttggcagcctgagctttctgctctgcggccggttttgccgcggctttgtggtgttttttgtgatgggtggtcttggcagccgtgctgtgggtggcagccggagcctgagtggtgcttactgcgtcagcagcgaaagcggcggaagagagacccatagcagcggcaacgaccagagctaatacttttttcattctgatatcctcgaaaagttttcttaatttcaaccccactgcggggccggtgaaatcactatatgcttgtcttttcgagctttccgtgagtgtttggtatcggcgtgtaaccgaatgtacaaggcgggaacgacaggacgcgccgggtagcccggcgcgtatgattacaggtagcgagtggtcaggtgctcgcggaagtagcggctattaagatcctcaccggtggcctgctgaatcaactgcgaggtggtgaagcggctgccatgctgccagatattctgccgcagccagtcgaacagggcgctgaaatcgccttcctcaatatcgcgatctaatgtcggcagcgcgcggcgggccgcggccatcaactgcgcggcatacatcgcgcccagggtataggaagggaaatagccgaatccgccgtcggtccagtgaatatcctgcatgcaaccatcccgatagttgccggtggtcgacagccccagccagtgctgcattttctcgtcccacagcgacgggatatcatctacctcaatctcgccgtcgatcagcgcacgttcaatttcataacgcaggatgacatgcgccgggtagctcacctcatcggcatcgacgcgaataaagccgggtttcacctgctgattccaggcgacaaaattgtcctggctaaaggccggccgatcgccaaaccgctcgcgcaccgccggtaacaggcggttaagaaaccgctcgctgcgtcccagctgcatttcaaaaaacaggctctgcgactcgtggatagcggtggagcgggcgagtcctacgggctggtcgacccacgggcgaggtagattctgctcgtagcgggcgtggccggtttcgtggatcacgccgaacagagcgctgagcaggtcgttttcgttgtagcgggtggtgatgcgcacatcctggggtacgccgccgcagaacgggtgggcgctgatgtcgaggcgcccgccgtcgaagtcaaagccaaggatacgcatcgcctgcaggcccagctcccgttgttcagcaatggggaaaggcccctgcggggcgattagcgtctgcttcgcctgcttctccaccgcctggctaagcagggaaggtagccacgatttgagatcggcgaacaggctgtccagccgcgcgctggtcatatccggttcgaaaatatccagcagcgcgtcgtaacgtgagccgcccctggcatcggcgcggatctgcgcttcctgacggctcagtctgaccacctcgcgtaggttgtcggcaaagcccgtccagtcattggcgggacgctggctgcgccaggcatgctcgcagcggctgccggccagcgattttgcttccaccaggctctccggcagcagcgccgcctgatcgtactgacgctgcatttcccgcaggttggcctgttcaacatcattaagatcctgctggcgggcctcctgtaaccattgtcccacttttttatcggtcaggatctgatgctgcagcacgccgagctcggccagcgcttcgccgcgggcgacgctcccgcccgggggcatcatcgcgaacatatcccagccggcgatggcggcgagatgcgaaaagcgcgacaggcgctgaaaggtacgggtaagctgctgataaggcgtattttcagtcatagtggcgttcggtccgtgacaggtgaataaagagattatcgctttgcctctacactatcctgatacgcccggcgggtcgagcgttgcgcacaggggaagggaaagacacatggcgggagaataagctcccctctgtgatcggtgtgacagaaaacggtaacatatcggtactaaactgtgatcgattacacaggtctggaggttcgggggtggtttatgaatccgttcacctggctgtttattgcactactgtccgttgatgccgtcagagagctgatgggcttgtcttccataatgggcttgtggtgaaacgtggcccgcaggccacgtcacacgcgactatttcagtcgctgatgtaagcaggtgccggtcaacagcgcggcaaggagcagcagcgcgataaacccaccgacgccgttccagccgtagtgatgccagaataccccgcctaacgtcccggcaagacttgaacccaaataatagctgaacaaatacagcgatgacgcctgaccgcgggcgcggcgggcgcgtgggccaatccagctgctggcgacggaatgcgcggcgaagaagccagcggaaaacagcagcatgccgatgaaaataagccacagggaagaaaagagcgtcagcagcaggccgcagagcatcaccgctgtaaagccaagcatcaccggcccgcggccaaagcgtacggtcatggcccctgccttcggtgaactccaggtcccggtgagataagctaccgacagcaggcctaccaccgcctggcttaacgaccacggcgacatcatcagccggtagccaatatagttaaacagggtgacaaaagcgcccatcagcagaaaaccttcgatgaacagcagcggcaggccacggtcgcgccagtgcagacggaagttaatcagcagcgttttcggtcgcagcgaggtcgggcggaaatggcgcgactcgggcaggatacgccagaacataatcgcggcggccagcgcaaagccgctgatcgccgccagcgccacgcgccagccgaagaaatcggtaaagaccccggtcagcaagcggccgctcatgccgccgatggagttgccgctgatatagagtcccatcgaaaaggcgacgaaactggggtggatctcctcgctcagataggtcatgccgaccgccgctacgccgctcagcgacaggccgatgagagcgcgcataatcaggatgccgtgccagctggtcatcatagtcgataacagtgaacagcaggcggccagcagcagggcggtgaccatcaccggcttgcggcctatagcgtccgacagcgggccggtaaacagcaagcccaccgccaacatcgccgtggaaattgaaagcgaaatactgctgctggccggcgacacgccaaactcgttcgacagcaccggcaggatcggctgcacacagtagagcagggcaaaggtggccagaccggcggagaacagcgcgagagtgacgcgcataaactgcggggtgccacgcttaataaacggatccgggcgggatgcaccagcgacgctgacctcgcccgccggcacggtgtcaacggttgttgtacgactcacagagaattccttgcgtagaagttgctgcttaccaacagagtgttgtgaccattcagctcacatttttagggtatgaaaatgtaaatattctgtctaatatattaataatctcaaataagacgttttaaatatgaatatcgagttgcgtcatttgcgctactttgtcgccgtcgctgaggagctacattttggccgcgccgcggcgcgactgaacatctctcaaccaccgctaagccagcagattcagatccttgagcagcagaccggcgctcgcctgtttgcccgtaccaaccgcagcgtcagcctgacggcggccggaaagcagtttctcgccgatagccgacaaatcctcgcccaggtggatgaggcggctgctcgcgccgcccgtctacaccatggcgaaacgggtgagctgcgcatcggctttacctcctcggccccttttattaaggccgtctccgatacgctatcgatgtttcgccaacgccttccggatgtgcatattctcacccgcgagactaacacccgcgaacagatagtgcccctgagcgaaggggctctggatttggggctgctgcgcaatactcaactgccggacaccctggcgtgggagcgggttctgcgcgagccgctgttggcgatggtcccggcgaatcacccgctggcccgccagccctcggtcagcctggcggcgctggcgcgcgagcccttcgtctttttcgacccgcacgtcggcactggcctgtatgacgacatcctcggcttgctgcgccgctacggccacacgccgaagattgcccaggaggtgggggaggcaatgacgattattggtctggtggccgccggcctgggggtatcgatcctcccggcctcctttcagcgcgtccagctcagtgaaatgcgctggctgccgatcgacgaacaggatgcggtatcggagatgtggctggtgtggtctaaacaccatgagcaaggggcactggcaaaacgctttcgtgaggcgctgctctcctggaaaagcgagcataattgaggcgaaaaggggctggaaatgtgcggtaaatcacaaggctaagtaaaaatttgacgttcaccgtcgaagtgcttcaccatagccgaaagtttatttcgaagcgcgaaaataagggagtcaatggtggtagcggatagtcaaccaggccatatcgatcaaataaagcagaccaatgcgggcgccgtgtatcgcctgattgatcagctcggcccggtatcgcgtatcgacctttcccgatttgcgcaactggcgccggccagcatcaccaaaatcgtccgcgaaatgctggaagcgcatctggttcaggagaccgagatccaggagcccggcagccgcggccgcccggcggtggggctgatggtggagaccgaggcatggcactatctggcggtgcgcatcagccgcggtgagatccatctttcgctgcgtgatttaagcagtcagctggtggtggaggatcagctggagctggcgctcaccgacagcacgccgtttctgacgcgcgttatcgaccatattgatcgcttctttattcgccatcaaaagaagctggaacgccttacctccatcgccatgacgatgcccggtattatcgataccgaaaatggcattattcatcgcatgccgttttatgaggatgttaaagatgtcccgctcggcgaagcgctggccaatcataccggggtgccagtctatattcagcatgacatcagcgcctggactatggcggaatctttgtttggcgcctcgcgcggcgcccgggacgtcattcaggtggtcatcgatcataacgtcggcgccggggtgatcaccgatgggcgcctgctgcacgccggcagcagcagcctggtggagattggccatacccaggtcgatccctacggcaaacgctgttactgcggcaatcatggttgtctggagacgattgccagcgtagaaagcgtgctggagctggcgcagatgcgcatggcgcagtcgatgagctcgctgctgcaccagcgtccgctgagcgtggagtggctttgtcaggcggcgctgcagggcgatttgttagcccgggacatcatcagcggcgtgggtaatcacgttgggcggattctggcgatcatggtcaatctgtttaatccgcagaaaattctgattggctcgccgttcaatctggcggcagaaattctttttccggcaatttccagctgtattcggcaacaatctctcccagcctatagccggcatattaccgttgaaagtactcagttctccaaccgcggaacgatggctggcgcggcgctggtcaaagatgcgctctataacggatccttactcatacgactgttacagggttaacattttttcatagtcacaccaaaaattgcgctatctcaagctgacctcagacggcttcacgtagactttgcccaccgttgattatttctctcccgtatatttcatcgacaaaactgtggggttagtgatgtttaagcgtttctttattacaggtacagacacctctgtcgggaagacagtggtttcccgtgcgctgttgcaggcacttgctgccagaggcaaaagcgtggccgggtataagcctgtggcgaagggcagcaaagagacgccggacggtttacgtaacaaagatgcgctggtgttgcagagcgtctccacgctggcgttaccttatgaggctgtcaaccccatcgccttaagcgaagacgagagcagcgtggcgcatagctgcccgatcaactacggtctgctgtccgatggtttgcagcgtctggccgcgcaggtcgaacacgtggtggttgaaggcaccggcggctggcgcagcctgatgaacgacctgcggccgctctccgagtgggtggttcaggagcagctcccagtgctgatggtggtggggatccaggaggggtgcatcaaccatgcgctactgacagcccaggcgatcgccaatgacggtttaccgctgattggctgggtggccaatcggatcaaccccggtctggcgcactacgccgaaatcatcgatgtcctcagcaaaaagctgccggcgccgctgatcggcgagctgccttatctgccgcgcgccgaacagcgtgagctgagccgctacgtcgacttagacatgctcggcaacgtgatggcgatagatcgaatcccggcgtaacgtccgcgacagcacagacgacacgacgcaggttatcagcaggccgggcagcagcgtatactgcccggtcatctcgcaaatcatcagggttgacatgatcggcgcatgggtcgtggcggccagaaacgccgccatgccggtcagacccatcatgatggccatttcttcacttcccggcagccacagcctgctgaagcaggcaaacagcatgcccatcgccaggccgacaaacagcgtcggggtgaagaccccgccaggcgcgccggagccgctgctggccagcaccgccagcagtttgcagataaatacgcccaccagcagcgcaccggacggcggcagcagcaaatagctttgcactacgctgtagccgttgccccatactgccggggtgatgagcgataagccgccgacaatcagcccgcccagcgccagctgccacggcggcgccagcttcagtttaacgaacccgcggtggctgtagtccatcagccagataaacagcggcccgcacagcccggccagcaggccagtcgccagcattaagccatagtgcagggcgctgaggttctgctgtaacacgacgtgatacagcggcgcggcgccgccattaagaaactgcgtcaacagcagggcgatcaccgccgagatcaccaccggcccaagcgaggccagcatcagcgtgccaaagagaatttcagcaataaacaggctgccggccagcggggcatgataagcgctggccatcccggcagccgcgccgcaggcgacccatagcttccattcactctgcggcgtgaagcgacgggcaaacagcgaggccgccagcgcggccagcaggatcatggcgccttcccggccaatcgcgctgccggtcaccacgaccagcaatgacgccagcgatttcaccaggcttgccggcgtatcgaaacagccgtcgccggtctccagggcttccatataatcggtggcggcatgcggacgcgcgacgctgcgtcgttgccagagccagagtaaggttcccgccgtcaggccgcccagcgcgggggtaaccagccgacgccacgccggcagcgactgtgcggcgttgaccaggctcccgctgtcattactgagcaacagcgtttccagaaccaccatagcgtggcgaaacagcgccaccgccagggcggcgagaaggccaatcagggtggcgatcagcaggcggcgaaacatcacctgcacatcaggatagggatgaagacgatgcattagtcacggcgaggttcagaaaacattggcttattgtgatagggaataaccttagatgcaaaagcgataagtgcgggtgaaaggctggaaagcggcaaaataaaaccgcgccggataccggcgcggcgaagggttaacgatagagcggtttttgcgccacggcgatcggcagattctcctgccactgcgccagagtcgcctgcgccagctgacccagcgcctgatagaaggggtgggcggcatggtcgacaaagacgctcaggaaacgcccggaccacggcagcaggtgccaggccagcagctgggcaaacaacgcatcctgctccgtttcgcacaaccatgccgccaggagtagcacggtgccgaaatgatcttccggttcgttgccatcggcctccagcgcgataccgttctcgcgcatccactggcgcagagccagcgtggaatcgccaaacagcacagactctttatccagccagacagagccccagggcggcgccggcagggcccatggcccgataaacaggcgctgccaggcttccggcaacgtttcttcagccgatgcggcaaaccctgacgccagcggggctgcgaccgggaagggccactgctgctgccagctcccgtcctggaaggcggcgaccagcggcgcattttccgcactattcggcgcataagagaacagagcgcccagggtgcgggcgcttaacgcgacggcgtcgcgatttgggatcggcatcatcacttattcctttctgcggcgcgcgcctgcgcgccgtctcattaaccggcaaccgccataccgacggtcatatgcagaccataaaacaggccgcggccaatacattcggcgatcaagaccagcagcaggccgatcagcagccccgtagcgcgcggcggctggcggcggatcagcggacatagccagcagccgaggcccagcgccagcagtaccaggcgtagcgcctggagtttgccgtaatctggcagcagggtggccgcctgctgaaccgagctgtgaagggtactgagcccggcgctttgcataatgataactgcggcgctgatgaccagcgcggccacgctcagtccggcaaaaaaccagccgttaaagtcgactttcgccagccgcagcagcagggcggcaaacagcggcccgctgaggagcaccgtcagaaagaacgcgctggtggtgtagccattgtaccatgttggcacggtattgatttggtaaacccgggtcattgcgaggacaaacagcagccctaacagcatggcgatcgccagccagactttacccagcgtcgccggcattttttccagcaccgccagcagccaccagaatccgcccacggcgaagaacagagcgccgctggcgatttcgttgctcagcgccgaggcgccgatgcggttcagcgagttaaacgcgcgcagcggtgaaccgagatgcatcaccgaagcaagaaaaccaatgcccatcaacagccagataaaaaacatattgcgcaccagccgccgccgggcttcccgttggtcccccagcgccagccagccaagaccgctgacgatggtcgcgccgaccacgcactgacccagcaccgtaaacagcaccagcggccattcatgccatccgtttcccatctcacacctccttcgggttcgccaggtaaccggtggtatcgccacacggccgggcattggcgttaggtttgataacgatactcggccgggtaaagtgcgccgacggcagcggcgctaccgcggccagctggccgtgcttagcgcgcagttcggcaatcggcccgaaatccaacgcccgcagcgggcaggactcgacgcagatcggctttttcccctcggcgacacgctcgtgacagccatcgcacttggtcatatggcctttgtcggcattgtactgcggggcgccgtacgggcaggccatatggcagtagcggcagccaatgcatacctcttcgttgaccaccacaaaaccgtcttcgcgcttatgcatcgcgccgctcggacagaccttggtgcaggccggatcttcacagtggttacaggcgatggagaggtaataggcaaacacgttctgctgccagacgccgttgtcctcctgccagtcgccgccggcatactcatagatccggcggaagctgacctccggagtcaggttcttgtagtccttacaggccagctcgcaggttttgcatccggtacagcgagcggagtcgataaagaatccatattgcgtgctcatggtttactccttaaaccttctcgatatcgaccaggttggtatgctgtggattccccttcgccagcggtgacgggcggtgggtggtcagggggcactgttgcaaagttagcgatgaggcagccttttgtcttattcaaaggccttacatttcaaaaactctgcttaccaggcgcatttcgcccaggggatcaccataataaaatgctgaggcctggcctttgcgtagtgcacgcatcacctcaatacctttgatggtggcgtaagccgtcttcatggatttaaatcccagcgtggcgccgattatccgtttcagtttgccatgatcgcattcaatcacgttgttccggtacttaatctgtcggtgttcaacgtcagacgggcaccggccttcgcgtttgagcagagcaagcgcgcgaccataggcgggcgctttatccgtgttgatgaatcgcgggatctgccacttcttcacgttgttgaggattttacccagaaaccggtatgcagctttgctgttacgacgggaggagagataaaaatcgacagtgcggccccggctgtcgacggcccggtacagatacgcccagcggccattgaccttcacgtaggtttcatccatgtgccacgggcaaagatcggaagggttacgccagtaccagcgcagccgtttttccatttcaggcgcataacgctgaacccagcggtaaatcgtggagtgatcgacattcactccgcgttcagccagcatctcctgcagctcacggtaactgatgccgtatttgcagtaccagcgtacggcccacagaatgatgtcacgctgaaaatgccggcctttgaatgggttcatgtgcagctccatcagcaaaaggggatgataagtttatcaccaccgactatttgcaacagtgccggtcagggtattcatgcaggcgccatggtcgatccgatctccggtcatattggcgtcgtgccaggcgccctggcccatcgccgagacccccggcatgatgcgtggcgtcactttcgccggaagacggacttcgccgcgctgattaaaaacgcgcaccatatcgccgtttttaatcccgcgtttttccgcgtcaagcggattgatccatacttcctggcgacaggccgcttgtaatacatcaacgttgccgtagctggaatgggtgcgcgctttatagtggaaaccaaacagctgcagcggatactggctgcgcagcggatcgtcccagccttcaaatgtggaggcgtagaccggcagcgggctgataacttcgtctttctccagctgccagcgggcggcaatctctgcgagtcggctggagtagatttcaattttgccggacggggttttgagcggatgcgcttcaggatcgcgccggaagtcgcgataggcgacgaagtggccgttcgggtctttgcgcttgtagatgcccattcgcttcagatcctcgtaggccggcagcgccggatctttcgccaccattttggcgtacagatactgcagccactgttcctgggtacgcccctcggtaaaacgttgatgcacgtcgtcgccgagccgtttcgccacttcgcttaggatccagtaaatcggtttgcgttcgaacttcgctgaggtggcgggctgaataaaaatcagatagcccatattgccggcgtaatcgttaggaatgatatcctcctgctcaacggtcatcaggtcgggcagcagcaggtcggcgtatttcgccgacgaggtcataaagttgtcgataaccacaatggtttcgcacttgctttcatcctgcagaatttcgtgggtcttattgatgtcggagtgctggttgatgagggtgttgcccgcgtagttccacaggaacttgatcggcacatccagcttctcttttccgcgtacgccatcgcggctggcggtcatctctggaccgcgcgcgatggcgtcggtccaggtaaagcaggagatggcggtcttcaccgggttttccagcaccggcaggcgctcaatggtgatggtgtaggttgattcgcgggcgccgctattgccgccgttgatgccgacgttgccggttaagatcggcagcatggcgatcgcccgggcggtgagttcgccgttggcctggcgctggggcccccagccctggcaaatgtaggccggcttgctcatgccgatttcgcgcgccagcttaatgatgcgctcggtggggataccggtaatacgcgaggcccactgcggcgttttagcgatcccgtcgtcgccctcgccgaggatataggctttgtaatgaccattcgccggcgccccggccgggagcgttttctcgtcgtagccaacgcagtatttatcaaggaaaggctggtccaccagatcttcgttaatcaacacccaggcgataccggccaccagcgcggcgtcggtgccggggcgaatggggatccactcatcttcccgaccggcggcggtatcggtgtagcgcggatcgatgacgatcattcgcgcgttagagcgctcgcgggcctgctccagataccaggtaatgccgccgccgctcatccgggtctccgccggattgttgccgaacatcactaccagcttgctgttttcaatatccgaggtgctgttgccgtcgttactgccgtaggtgtagggcatggcgcaggcaatctgcgcagtactgtaggtaccgtactggttaagcgagccgccgtagcagttcattaaacgcgccaccggcgacgcggaaggcgacgaacgggtgatgttgccgccgacgatccctgaagagtagttaatgtatacggcttcgttgccatactgcgctaccacgctcttcaggcggtcggcgagggtatccagcgcctcctgccagctgatgcggacaaatttgccttctccgcgcttgccgacgcgcttcatgggatagttaaggcgatccggatgattgatgcgccggcgaatcgaacgcccgcgcaggcaggcgcggacctgatggtcgccgtagcggtcgtcgccggtgttatccgtttcgacgtaaaccacttcatcatcacgcacgtgcagccgcagggcgcagcggctgccgcagttaaccgagcaggcgccccagacaatgcgggttgtgtcgcctgtagcctgttgtaccgccgccgcggcgcggcgcagcgtaaagggcagggtcagcccgccggcggccagcgccagggagccgagggctgtagattttagtagcgcgcgtcggctgacgccgccgggagattcctgattcgacattgctcactccatgatagttatgctgtgcggagaaggaccgccacgtcattaacagacgcaggggtgagcgataatacgttatgggtagccagtagaccttatccctggtcaatgcagggataagatctttcatttgaaaccgaagagggcttactgagcatcgttttcggcgggactgtcgctgttacgcgtataggtgattttgaaggtgtcgttggcgcaatgaccgaccacctgaaccccgggctggtctgcctgatcgtttggcacaatggccaggctgaaggcggtttccggtacgccattgttgatgatcttctgctggatgtcgcttttgacccgttcacaggagtcgggagccgccagtacggccgtggagcacagcagtagcgcagcgccggtgcagagggatagtttcatcttacgctccttatcgatgttatccagatttaagcatagcagaactggtgtaaacaattgtatttgctaatatgatcggatgtacacaaaaggaatcgtctgtgaaaagattgtattggctgatcccggcagcgctgctgctgacggcatgcgaccgtaaaagcgccccggacgccttcaccccggagatggcgagtttttccaatgagtttgagtttgatcccctgcgcgggccggtgaaagattttagccagacgctgctggatgaacacgatgtggtggtcaagaaggtgagcgctcagctctccagggaagggtgtttcgatctgctgaccctggaagatgtggagaacaaaaccggcgccacgctgctgctggacgccaactattacgtcgacgggcgcacccacgagaagcggctgcgcctgcagggcaagtgtcagctggcggagatgcctgccgccggggtgagttgggagacggatgataacggttttattatcaacgcacgcggcaaagagaccaccgccacctaccgctatgacagcgatggctatccgctgggaaaaaccaccaccgccaaagaggagcgatttaccgtcgcctcaacgccgtcaaaggatccgcgtaagaaattggactataccgccatcagcaccttcaacgatcgcacgctgggcacggtgcgtcagacctgcgactacgacgatcacgacaatccgctgagctgtgagctgcaggtggtcgatgaaagcgtccagccgccgctgacccgccactacaccattaaaaaccgtatcgattattactgagccgtcggcttcagcagggacggcccgggcgttttgtgctcggccagatactggtgctggaacaggcacatgcggatggtgttgcggtactcgccgttaatgaaaaactcatggatcagttcaccctcgaccataaagccgagcttacggtaaatatggatcgctttttcattctctttatcaacgattaaatacagcttatacagattgagcacggtaaagccatagtccatcgccaggcgtgcggcgcgggtggcgagaccttttccctggaagtcgggggagatgatgatctggaactcggcccggcggtgcacatggttgatttcaaccagctccaccagtccggctttatcgccattgcattcgatgacaaagcggcgctcgctttgatcgtgaatatgtttgtcgtacagatcggagagctcaacgaaggcctcgtacggctcttcaaaccagtagcgcatgacgctggcgttgttatcgagctggtggacgaagcgcaaatcttcgcgctcaagcgggcggagtttgacgtgtagcgcgtcggtcatggagattcctgtggtcaaaacggaaagggattacagaaaggcggcgcccgcaggcgccagcgtggtcagggagcggctcagggattgatcgcgcggccggtgcgacggtcaagacagcgcagggtgtttggctcccaataggcattgacgttggcgctcttctggcagttatcctgcgcgtcgaaagcgacatcggctttatcccactctttttccgcccgtttgttcaccttctggcgcaggctgcgggtgtcgttccattgctctttttccatcgacgcctgctgacggctctgcgcgctgtcgccagattcaatcaccagccggtcggtggcggcataggagctggaggtgtagaccacagcgcttaacgccagaatggcggtcaggcaccagcgtttgttcagtgtcatgttcatcacgatttcctttaagtgatgggttaaccctcaggttcagtttactacagctcttttgtcgggcatagccggcaaaacagcgtggggcagaggccattatcgcgtagaatggttcaacgctttgtctcttttacgaatcttttaatgctcaaaacaacgctgctgttctttgctaccgctctgtgtgaaatcgtcggctgttatctaccgtggctatggctcaagcgcggggcaacgccgctgctgctgatccccaccgccctggcgctggcgctattcgtctggctcctgacgctccatccggccgccagcgggcgggtatatgccgcctacggtggggtgtacgtttgtaccgcattgctctggctgcgggtcgttgatggggtcaaattaacccattatgactgggcgggcgcggccatcgccctgtgcggcatgctaatcatcgtggcggggtggggacgggcctaagcccgtcatgtgtgatccctgccgcttttttcaaccctaattcttgtatggtagtcgacctgttgccttacttatcagacatcctatttcatatgactctgtaaggaacaacgatggctatcgagactcttgccgcccggaccggggcgacgccgttacgcatccgtcgggtgcagaagatcaccctgacgctgctgtttatcgccggtatcgtcaactttcttgaccgctcttcgctgagcgtcgccggggaggcgatacgcgccgacctgggccttagcgccaccgagttcggggtgctgctctccgccttttcgctctcctacggcttcgcgcaactgccctccggtattttgttggatcgcctggggccacggattgtgctgggcgccgggctgattttctggtccgcaatgcaggccctgaccgggatggtcaattcgttctcgcattttattctgctgcgcattggcctcgggatcggcgaagcgccgtttatgccagccggcgtgaaatcgatcaacgactggtatgcgcaaagagagcgcggcacggcggtgggaatattcaactcctcgacggtgctgggccaggctatcgccccgccggccctggtcatcatgcagttggcctggggttggcgaacgatgtttgtggtgattggtttagccgggatcgtggtcggcctgtgctggtatgtgggctaccgtaaccgtcggcagtttaccctgcaggaggaggagcagcagtatctggccagtgaggaggcggcccgcccggcgctgaagtttagcgaatggctggctctgtttaaacggcggactacctgggggatgatcctcggcttttccggtgtgaactacaccggctggctgtatatcgcctggttacccggctatttgcaggcgcagcaggggttaagcctggcccgtaccggctgggtggcggcgatcccgtttcttgccgcggcggtggggatgtgggtcaacggcctggtggtcgatgccctggcgcgcagaggctacgatcaggcgaaaacccgcaaaacggcgattgttatcggtctggtgctgtcggcgctgggcaccttgctggtggtgcaatcgtccacgccagcccaggcggtggcttttatctccatggcgctgttttgcgttcattttgccgggacgtccgcctgggggctggtgcaggtaatggtggcggagcataaagtggcttcggtggcggcgatccagaacttcggcagctttgtgtttgcctccttcgcgccgatcgtgaccggctgggtagtggatacgactcactctttcaatctggcgctggtgatcgccgccggggtgacctttgccggggcgctgtgctacttctttatcgtcaaaactcgcatcgattaacaacgctcggcgattcgtcaacagcaggcccgcagggacgcgcggccgccatgttcttctcctgcgctatcctgtcactgcggcgattgcagccacgtgccccgtgctttatcaggtgagatcttcttgtatggtagttgacagaaatcaaagatgttataccaattgcgtgagatggttgaggcacaaaggcattctcctcgagagttctccccgagaatggttgatgggctacataacaacgagagtcatcatggaaaacaccctcttaaccgctaacgccacgctgccgacctacgatcgcagcgcactgatcccccgtatcgttcatcttggttttggcgcgtttcatcgcgctcatcaggctgtgtatgccgatatactggccagcgagcacggcagcgactggggctacaccgaagttaatctgattggcggcgagcagcagatcgccgatctccagcagcaggatctgctgtataccgtcgccgaaatgtccgccgacgcctggaccgcgcgcgtggttggtgtggtgaagcaggcgctgcacgccggggttgatggtctcgaagcggtgctggcggcgatgtgtcagccacaggtggccattgtctccctgacgattactgagaaaggctattgccattcgccagccagcggcgaactgcagctcgatcacccgctgatcgccgccgatctgcataacccgcaccagccaaaatcggcggcgggggtagtggtggaggccttatctcgccgccgggcggccggcctgcctgcttttaccgtgatgtcctgcgataacatgccggaaaatggtcacgtgatgcgcaacgtcgtctgcgcctacgcccgggctttagacgaggatcttgccgcatggatagagcagaatgtcacctttccgtcgacgatggtggaccggattgtcccggcggtgactgccgaaaccctcgataaaattacccagctgaccggggtgcgcgacccggccggggtggcctgcgaacctttccgtcagtgggtgattgaggataactttgttgccggacgtccgcagtgggagaaagcgggagcggaactggtcgccgacgtggtgcctttcgaagagatgaagctgagaatgctcaatggtagccattcgttcctcgcttatctcggctatctggccggttatcagcatatcaacgactgtatgcaggacgataactaccgtcgcgcggcgctgtcgttgatgctggacgaacaggcaccaacgctgaaggtgcagggggtggatctgtcacgctatgccagtttgctgattgaccgttactgcaatccggcgctgaagcaccgcacctggcagatagccatggacggcagccagaagttgccccagcgcatgctggactccatacgctggcatctggtgcatcagcgtgattttacactgctggcgctgggcgtggcagggtggatgcgttacgttggcggcgttgacgatgcgggccagtcaatcgagatatgcgacccgttgttgccggttatccagcaagcggtggctgccagcgccgatggcgaagcgcgagtcaaagcgctgctgggtattgaggctattttcggcgtcgaactgccgcaggagtcacgctttgtcacggcggtgacccgcgcctacttagcgctgcagcggcagggggctaaagctaccgtcgccgcgtgggccgccgcgcaataatctttttccggtgtcggtcccggggtcgacaccggctcttcagttatttctacgatactccgctgatgtctattttttgctagcgatcggttttagcagacgcagaatatgatcgaacgcaatgtctatacataactctatatttccctgatttactaaagataattagctgttatttttccgaacaatggctggtatttcaccgcaataatggcatagttaagttattgaaaaagaactttctctgcaaaaggagtacgggccatgtataaaaaaattttattgcctgttgatgtctttgaaatggatttaagcgataaagcggtgcgtcacgcggaatttctcgcttcggccgaaaatggcgagatcaccttgctcaacgttctgccgaacagcagccgttcgctattgcgcggttttacggcggatattcgtaagtttgaagcctatatgaaagaagagtcggagaaaaaaatgcgcgaggtggcgcgactgttcgccatccccatgacgcggatccatacccgcgtagtctttggcaacgtgcgtgacgaaattctggctatcagtaacaacgaagagttcgatgtcattgtgattggttcccgcaaaccggggatctccacccatctgctgggctccaacgccgagtcaattctgcgctacgccaaaacgccggtattggtcgttagataatcccttcaatgaggacggctgcgtcggccatgccggcagccgtctgactcttattcttcactaaaccagtcgcggttctcctggcgaatcagcagtacggattcgctgatttcatgcaaatggatactcatggctttttctaccgcctcggcatcgcgtttttccagcgcggtgaaaatctcatgatgctggcgcagaagcatctcaggagaggtgacatggtccagactcatatagcggacgcgatcgatggcggctttaatattttccactgtctcccaggccagctgacagtcggcgataatcgacagcttctggtgaaattcatcatcgagcaggaaaaagtcgtttaactgctgccgatcaacagcaatacgctgctggtgaagattctgttccagctgataaagttgctcttcgttaatcatgccggcggcacggcgaaccaccgcgcactcaatcgcctggcggacgaagcaaccattacgcacctgcgacaatgagattttattgacgtagctaccgcgctggggacgaatctggataagtccgttttccgccagcttaatgaaggcttcgcgcaccggctgacgagacaccgcaaaacgcacggagacttctttctctgacagcggtgtaccaggcgggatcaggcagtgcacgatatcccggcggaggatgcgataaatttgctgattgacgggttgcgtcggattcagttgcgattctgcggccattgatggttactttttagggggttatgcgcactattttacgcgttttttgcgtttccgcccatacccggcccgcaggccgggtggctgacggttagccctgacggtgaacgctgagtccggcaaagctctgactcaccggcatcatctccagggtgttgatgttgacatgtttcggcagggtggcgacccaccagaccgcctcggtcacatcttccggcgttagcgcttgggtattttcgtaagctttttcggctttagcgtcatcgcccttaaagcggacgttagaaaactcggtgccgcccaccagacccggctcgatgtcggtcacgcgcaccgcggtgccgtgcaggtcggtacgaagattgaggctaaactgacggacaaaggctttggtcgccccatagacgtttccgccggcgtaaggccagctgcctgccgtagagccgatattgatgatatggccgcgattgcgctccaccatccccggcagcacggcgcgggtcatgtacaccagccctttattattggtgtcgatcatatcttcccagtcttccacactggcgcggtgcgccggctccagaccaagcgccaggccggcgttgttcaccagcacatcgatagcctgccactcggccggcaggtcagcaatcagcgtctcaatggcggcgcggttgcggacgtcaagttgcgcgatataaaggttatcgcccagctcgtctttcagcgtcttcaggcgctcttcacgacgaccggtggcaatcactttatgaccgttagcgataaaacggcgagtaatactttcaccaaaaccggcggtggcgccggtgaccatgataatcatcttactgttcctcaacgctttttgtgttttcataccatagcacgcacaggcggcgaccggtaacggaaatcattgcgaccccttaaggagaggcctaatcttacagcattagcctgtacaggagagaaagatgtccgaacgaaaccccttttttagcgtcagtacgttgccttaccaggcgccgccgttcgatgtgattgacgacagccactatcgcccggcgtttgatgagggcgtccggcagcagcgggccgaaattcgcgctattatcgacaatccgcagccggccagtttcgccaacacgctcgaggcgctggagcagagtggtcagctgctggcgcgggtgacgcgggtctttttcgccatggctggcgcccataccaatccttatattcaatcactggatgaacaattttccgccgaactcgccgagctggggaatgacatctggcttaatgcggccttgtttcagcgcgtgaacagcgtctacgagcagcgcgacgcgctggcgctggacagcgagtcctatcgtctcctgaccctgacgtggcaacgttttgttcacgccggggcgacgctggctcccgagcagcaggcggcgctgcgcgcactgaacaccgaagcggctacgctgcaaagtcagttccagcagcgactgctgggagcggcaaaaagcggcggcctggtggttgattaccggcatcaactggctggcctgagcgatgaggagatagcggcggcggctgacgcagcgcgtgaaagagggcttagcgaccgctggttgctgacgctgaccaataccacccagcagccgcagctgcttgcgctgcgcgaccggcaaacgcgggagaatctcttcgccgccggctggacccgcaatcagcagggcgatgagcatgatacgcgcgacctggtactgcggctggcggcgatccgcgcgcagcaggctgagctgttgggagccgctgattacgccagctgggcgctgaccgatcaaatggcggcttccccggcggaggcattgggctttatgcgtcagatcgcgccggcggcgcgggcgagggcggaacgtgagttggcggacatccagcaggtgatcgacaacgaaggcgggggttttcgcgcgacggcatgggactggctttactacagcgagcaggtgcggcgggctgcctatgccattgatgacgcgcagctcaaaccctattttgccctcgagcgggtgctgcaagacggcgtcttctggacggcctcgcagctctttggtctgcgctttgttgagcgcttcgatataccggtctatcacccggatgtgcgggtctgggagatcttcgatcacaacggcgaagggatggcgctgttttacggtgactactacgctcgtgactcaaagagcggcggcgcatggatggatgtgtttgtcgaacagtcgactctgcgcgcgcagcgcccggttatctacaatgtctgcaactacgtccgcccgcaggcagggcaaagcgcgctgcagtcgtgggatgaggtgatcaccctgtttcatgagttcggccataccctgcatgggctgttcgccagccagcgctacgccagtctctcggggaccaatacgccgcgcgattttgtcgaatttccttcgcagatcttcgaacactgggccagccagccgcaggtgtttgcccactacgcgaagcactaccagtccggggagccgatgccgcaggcgctacgcgacaatatgttgcgtgcggcaaccttcaataaagggtacgacatgagcgagctgttggctgctgcgttactcgatatgcggtggcatagcctgtcgacctcggcattaccggaggaggtggacgcgtttgagcagctggtgcttcgggaagagaacctggatctggcggcggtccccccgcgctatcgcagcagctatttctcccatatcttcggcggcggctatgcggcaggctattacgcctatctgtggacccagatgctggccgacgacggctatcaatggttcgtggagcagggcggtttgacccgtgagaacggtcagcgtttccgtgaggcgattttatcacgcgggaacagcactgatttagctgaactgtatcgccagtggcgcggacacgatccgcagattgagccgatgctgaaaaatcgcgggttgagtgcgtagggcaattttagtctgacaagataaccgggcgcgctgcccggttttttgtctgatctagtcgtaaccttatatttcttttacctcacgctgcctaaatctctatcgctctctctccctttaagcattaacgtggcttcttcgatacgaatgaagcgcccggaatcatctatttcagcgaacatataaacttccatgtccacctcttctccgctgcgcctggtgcacagaacgcgatgccttgtggcataaagattcccgttacgaagttcgtcatgtaactcaattttagcgaaggcgataatttcccggagtctacgcgcatgctgagcaaagccatctaatccttcccacttgttatcagtacgctgccgataaccgggactaaaatagcgactgagtatccgatccagtggtatctgttggtggttgataatgtcatccaatactctagtaatagtaatcattttgatggttagtcctctgtgaaagtgatgaatactttacaatcgactaactggcttcagtacggtataaaagacattaaacgcctcaaacacgccaatatgcacgatccattgattccattcgaaccggtgttttccccccagggacccactttactcgtcgcggtacgtcagtctgaggtaatacgggagactccacgccaccatcacagctgtgggcagttaatcggtgccatacgtgggctacttacggtcgatggcggtgattgtcgctgggtggtaccggcaacacatgccgtctggataccgccaggtgttccgcacggcctgcgctcgcacggtccatattcaggatggagtgtttatgtttctgccaaagcctgtggcgagctacctgataagccatctgttctctcaatgacaaatctgctgcgtgaagcgataacgcgagcggctgcatggcaaggtgtagagcttaatgcgtcccaaaaacgtttagctggcgttattcttgatgaaattggttccctccccagggttaatcttgggcttccaatgccgcaagatagccgattgctcagaatcgcgcaggcgctgtcagcaaacccggacgacgggcgcaggttggaagaatgggcagcctgggccggcatgtcatcacgcacgctcacgcgacgattccgagccgaaacgggttttagcttcaatgaatggcgacagcggatacgcttactcagggcgcttgagctactggctgccggcaagccagtgacggcgatagcgctggatctgggatatgacaatgtgagtgccttcatagccttgttccgtcggatgttcggcactactccagggcggtataaaatttaattatctcttcgctgaatatgatgcgttatccgccgctttgattacgtttgtcatgggctgagaggggcaagtaattcgggcccctgatttttcacattgccgaccgcccgcgttaccgggtgccaggtaaaatcgtcggcggaaacggctccgtcgctggcaatctccgccgattccgcgccggtgacatcctgcctcatccattcgcgggcggcttcaggcgtcaggaccaacggccgacggtcatgaatatcgacaagaccgcgatcggcggcggccgtcacgatcaagaatccttcggcatggtccccacgttcgaacggagtccgaccaatcgcggccataaaaattggctggtcatccttacgctggataaagtatggctgctttttatttccttcctttttccactcaaaccagccgtcggcgaagcagatcgcccgtccgtgctcccacagcggcttgaacatcctgctggaggctgcagtctcaacccgggcattaatcagcggcggtttatcccaccatcctggcgcatagccccagtaaacggcatcgagatggagttgctcatcgcgttcattgaggagtaaaacttttgtcccgggcgcgacgttatagcgcccgataggcgccgggtcccaggcaatatctcgttcggccgcttccacgagatgcgccaggtattcctcccggctttgcgcttgcgcaaaacgtccgcacatagccacctccagcgtgatgtctgactaacagtatagatcagctgcaaaacggtgttttcacctgcccaaataccacgctccttccacgttagtagaccattatttcaggccgtcatcttgcctgacgtcgcgacagtacacgctgggcgttaggcctggcattgtccgtttatgcttcatcgttattaccctaacgcctgtctgataaaggaaatcgtttttactctttttattatctttcagaattatcgcacagagttttacctttgtttgaaatggttgtcgctgggttgtatttgaaaatatccaccccttattatttaaaaagtcatctttatcttttaaaaggttgttatgagtaacttactattattagtcctggcggtggtgttattgtttacatctttgttttttggcctgtcctatgttagagaaagaagaaaaatgaagatgcgctttaataaattccgacgttaaccgatccttcctgcggaaagcgcaagagcaacagatgagaatctcgttaactcttgtttggtagctatttggaattttttcataatattgattttgtgagagaagatcgtcttatgactgatgcccagtttttgcgctatctgctgattgttcattcccgttctgatcgcattgataatataaagttgtgatttggtcaaggttaaccgagggcatttgacacagcgtctgctgtctttttccagcccaccgcaactagatgttgtcgactccgtcagacgttttgcaatctgattttttacgcggcgcaagtcgctgttcatgctgataaaagtggcatcgccaagacaaagtggtaactgttcaacctgcaaagcgctgtcggtggcgacgaaaataaaaatagacgtgtgcggaggaagttttttgaaaaacgggtggcatagataatgttcaccagcggccatttctgtgaacagcatatcaatcggacctaatatatctgtgaaatagtccacaacggaatacggttcacggatgtgttcttccttcgcgatctcgctaagcagttcgcaaattccgcgattaagaaatatgttttcagtgttaattaaaatatcaggcatagtcatggcgatcgtgaaagttgtcatgcatttaaagtggagaacattaaatgcgtatgcctttaggatatttctaataatcaacaaatgcaataagtctaattttggactttgagctggcgagtaaaattaatggtatattaatcaatggcttattttttagcgttgcgcgggcatgaccgctaatttggcacaaactgcttaaattgcttatattgcatgcgtaaattctggtctcaaatatattaatcagggttacttattcactgtatgaattgctttttcaaaaataccttttgcaggcgcgggtccttgaggagattgcgcctgagcgaaacctggggtggtcattgataaaaaggggcggggtagacccgccgctgcggagagtgaacagcaacggcgtacaacagaatcagttatcaggattgttggagatgcttttccacaccattcccaggccgatcaacatcgacgcgaagagggcgaacagggtggttgagataaaaatgctggccatggcggtgcctcagaaagtgcgtatgcagatcattaggcacggtgtcggatgaaaggttccttacccggccgggtatattttcaccagcggcgtccggttgacggcaacaaggcgaataccacgtcgaagcgccgctgttggcaaggggattctgacaggcagccgggttgctaaccgcgctgttcaaggggagaatacacaacggcaaggggggagcgattcggacgttgacatccccttaaacaagttatatatacatgtcgcttctgtttattgaatgttaaacagcatcagttatgggactcagaagcgccacagcccccgccgtcgggcgggggtaacttcgccaccggcatgcttatttttcactgaggctggcgaagaaaatttttttatttcgggtcttgaaaaacgcgccttagatattattttatatagcggacaagcaatgcttgcctttatgttgagcttttgaatggatattcaggaggttaattatggcactcaaaaccttgtcagcactcccggtatttgctgattctctttttgccgatcgctttaatcgtattgaccgtcttttcagccagttaacgggcgatacgccggtgggcactttaccggcttatgatttacagaaagtcgacgacagcaatttcctgctcagcgtcagcgtgcctggctggaaagatgatgagctggaaatagaaaccgtaggggggaatctgcatatttccgggaaacgccaggaaaccgatgcctcgacagacagcggtgaacgctggatttataaaggtatccgccgcgctaatttccagctcagtttctctcttcctgaacacgcccaaattaatcaggcgcagctggatagcggcatcttaaaaatagccatccaccaggaaatcccggagagcgaaaagccacgtaaaattgcgatcgagaatcaggggcgcgtgatagaacataaagtttgattcaccgttgttccgacgatgttaccttaaaggcccgccctgcgggcctttatcctttcccctgaaaatataaatggccccccgacgacaaagaaatcgatatgctattctgttaacagacgcagtgagtctgctatttctttcaatttcggcgaggaggaagaatgactgacgagatcgatagcgacgcaaacaatacgcatgaactaaccgctgaagtggctcgggcgctgatcgcgcgcggttggcgactgaccacggcggagtcttgcaccggagggaatctggcggcagcgctctgtgcccaggcggataccgcggcattttatgataccggcgtagtgaccttcagcgatgaagccaagcgcaacgtgctgcaggttcgcgcggaaaccctggcggtacacagcgccgtcagcgaagcctgcgttcaggagatgtcctctggtattctggcgctcgccggggccgatatcgccatcgccgtcagcggctacgccggaccggagggcggggaagatggtacccccgccggcacggtatggtttgcctggaattttcgcggccagactgaaaccaaacggatgtgctttgccggcgactgtgagaccgtggtggcgaaagcggtacgatatgccctggcggcgctgagcgaaaagcttgcccactggcagtgacgatgcccgggggcgcggccttacaggtccattgcctggcgcgctaccggccagcaaatctccccgatgccgttaaggcagggtcgggaaaagagaaagccctgaaacaggcgtatgcccaccgactgcagccagcaccactcctccagggtttcgacaccttcagccaccaccgtaatgccaagatcctcgcagcagcggacgaccgaggcgacaatcgcctgtttggtgccgctaatatggatatcgcgcaccagttccgcatccactttgattttatcaggctgaaaacgggtcagtaacgacaggccggaataacctgcgccaaagtcgtcgatggccagcttcatgcccgcgacgcgcagggctttgagcaccttgcggaactggtcaaagcaggtgatcacctctgtctcggtcacctcgatcagtacctgatccggtctgaggccggccgccagcaggctgtctatcagccagcctacggcgtcagggtggtgatacagcgatccgggcaacaggttaatcgccagctgatgtttcccgagcggcagctggccggcgagagcgaatgcatatgctttgctttcaagatcaaaacggtagcgatcctccgccgcaatggcggcaaacatttccacgggagagccgccggttgggctgcggatcagagcctcaaaggaagaaactcgctttttagccggctcgacaatagcctgcagagcaaactggcaaggttgaccgggcaggtgctgcggcgcggccgtacctgacgcgggcatcatcatccagcgagagggctgcagcggctcgggcaggcaatagcggccgccgtcggcaatgaaggcgctaagcagccggaacatccggtcgttgaccggttcggtgaccccaaacgtgctaaagcgcagaatttcctccagcgcgccatcggtttcaaacagccggagatccagtatgcgcattccggtgccgtgaaaacgtcggtaggctgagtaatcgcgcatcagctccactacgtcgcgatgacgcgggtcgctttggatttcgctgaacagcgactcaagtgcctcctcagtcccttccaggacctggaaaaactgcaggccgttaaacagcagaatgccggtgatgccaaggggcaaatttttactgctggcgcgatggactaaagcgtcgagatcgacgggcgggcggtcaggatgaacctggctgcggtaaatcagggtggttagcatagttgttacgatcgctcccgcggcgtaagaacatccgcgctcagcatgcaagatgagtatggcctgaccctaaaggagggcgaggctgatatgtacaaacattcaaccaaccgtgatgtccgctacgcggaacgcgagcttcactttgtgattccctccactgtacagggaattacacatttggctatctttttctcatcctcaatgcaaaaagacgctaacaggcctctcattccctcctcagacactggcgctgcgtcttattttacctgttaatattcgctaccaggaattatcctacggaaggtgcgaataagcaggtcatttcttcccaagctgactcgctgattaaaatttcgcggatctgggccgatttttttcccgcaaacacatcgaatcagcctatttaggctattttttccaccatttctggcgttatttccggtttttactgagatctctcccactgacgtatcatttggtccacccgaaacaggttggccagggtgaataacatcgccagttggttatcgtttttcagcagccctttgtatctggctttcacgaagccgaactgccgcttgatgatgcgaaacgggtgctccaccctggcacggatgctggctttcatgtattcgatgttgatggccgttttgttcttgcgcggatgctgcttcaaggtttttaccttgccgggacgctcggcgatcagccagtccacatccacctcggccagctcctcgcgctgtggcgctccttggtagccggcatcggctgagacaaattgctcctctccatgaagcagattacccagctgattgaggtcatgctcgttggccgcggtggtgactaggctgtgggtcaggccactcttggcatcgacaccaatgtgggccttcatgccaaagtgccactgattgcctttcttggtctgatgcatctccggatcgcgttgctgctctttgttcttggtagagctgggtgcctcaatgatggtggcatccaccaaagtgccttgggtcatcatgacgcctgcttcggccagccagcgattgatggtcttgaacaattgacgggccagttgatgctgctcgagcaggtggcggaaattcatgatggtggtgcgatccggcagggcgctatccagggataatcgggcaaacaggcgcatggaggcgatttcgtacagggcatcttccatggcaccgtcgctcaggttgtaccaatgctgcatgcagtgaatacgcagcatggtctccagcggatagggccgtcggccattgcccgccttgggataaaacggctcgatgacttccaccatgttttgccatggcagaatctgctccatgcgggagaggaaaatctcttttcgggtctgacggcgcttagtgctgaattcactatcggcgaaggtgagttgatggctcatgatgtccctctgggatgcgctccggatgaatatgatgatctcatatcaggaacttgttcgcaccttccctaccattctatttcccactctcaaaaatgaggcgctggtcttgcctgaatataatcgagtgaatattatcactctaaattaaattcttttgtcaggtttgatatgagcgacttctttattattttgtgtctgattttatgtcccatcatttctttatggagtggcttttcctatattcaggaaaggcgcaagagacggtatgttttccgttccagaagatgattgtttgacagaataaaatgacgagttgtatcagcgtttggcgagcagttgcacaaggttgttaaactgctgacggctattcaaattaaatttactcataatattctttttatgtgaatgaatcgttttgggactaatatttagcgcagcggcgacttcatgcgggctcaggccaatactgaacgcgtaaatgactttggtttgcgcgtcgctgaccgacctgcaggcgcaattaatgcaacgccgcagacgattgaacggcgggtcttgccgcggtagcagcggacgctcaatggcgttagctatctcatctttcagccgctgaacgcgagcgtgaggcggcataaataccgcatgctgcagacaattcggtaaaccctcatctacggtagcgtgttcattgtccgggaaaataaaaagcgtatattgttccggggcatgctgaaaaagatcctggcacaagtaccactcccccgcgaccatttccgtgaatatcacatcagcttgcgccatcgatcctgcatcccattgttgagaaaactgatagtgtggccgcccggcggccttcatcgcttcatcaaccagttcagcaatagcgactcgcaaatagtgattttttatattgaacaaaaaattagtcatataacttccctgtgggcattaaaaaacatatctggataaattaaagaatataatgatgatgcaggtactatttttagccgtggtaatctaagggatgttttccattaatgcaatatctggtggggaaagtgagataacggtatattgatatgcgaaagttcctaataaacaaagccttaagcatatatttgtcactatttaaagccgtttcctgtttttttatttttgcgatgcataaaaagcttagtgatagccgcgctctgttgttaaaattagcggaggacaagaatacaggatgtatgccgtacttatgaagcagatgctctatttgaaaatgctggcgtggctggaggataatatctattgtaacccggcgatcgatgacctggcgctgtatatgggctattcacgtcggtttgtgtacgacgtgttttaccagtatggccagttacccatcgggcagtatattcgtctgcggcggttgaccatcgcagcggtcagtctgcgcttaacacggcaaccgatcgccgctattgcctggcagttaagctatgactcgccgcagaccttttcccgggagtttaagaagcgcttttcgctctcgccacgtgaataccgttgcgcggcgcactgggacacggcaaagctgttgaaaaagtttcacccggacggagagagcctacctctggctcgttttttttctctgccggaacaggtctattatggctatccgatgaagtatgaactgcgcctgtcggatttggtgttgcaaagcaccgctaagacgagcatcagacaaaaggttgaccgttttttcaccgctggcggaggctcgctttccgtactttccgactacgccgcggcgagcaaaaatgagcttaacgtcgaggttaacgcttttgtcggctgtcatgaggcgggaaagctgccccccgcgctggccatgaacagctcgctgaccacccggtcagggctttatgtcggggttgaattctacggcaattggtcacgttatgctcgtttatccagcgatctgtatatggagctgctgccatccctgggggtaagtcgtcgggacggctatgacattgaatgttttataacccgccatgcggaaggcgaagaggcaggggacaggcgctatcgcgtacgctattttatcccggtgacgctgtcggcagcgggtctgcggtctgacagcggtagtgggtcagggcctgtgccggggcgaagttaaggtggccggagccacccaggttaacatcaaagcgcaaaccacagcagccaggtgatgagaaagcccgtcacccccatgatggttgtcaagacggtccaggttttgagtccatccggcaccgagagtccgagatagcgcgtgacgacccagaacccggcgtcgttgacgtgcgacagcccgagcgagccgaagcaggtcgccagcgtcaccagcaccagctgcagcggctccagaccgacaaccgcctgcgacagcagaccggaggtggtgaggatcgccacggtggccgaaccctgcgaggctctgagcaccagcgatagcagaaaagcggcgggcatcagcggcagatgtattgtctccagcgcctcggctaaggcattaccgatgccggaagcgaccagtacgccgccaaaggcgccgccggcgccggcgacgaggatcacgtccgccgacgaggggatcgcgctgccggtgacttcgcccagctttttcaggctcatccgccgacggatgcccagcgtccagctggccaggcccagggagatcagcagggcgaccggcggggtaccaatgacggtcatcagctggcgaaccgcgttttccggcagcagaagcgcctgacacagcgtcccggaaacaatcagcatgatgggcaccacgatcagcccaccgataaccagcgcattcggcggcggcagacgggtctgctgcgcgttaaccgagagatccggtacttccgccgtttgttgctgctccagcacgttaatcgacagatgataatggcgccgattgataaaccgggcgacaaaatagcccacgataccgacgaccaccgacaccccaatccccgccagcatcagccaaccgacatcgctatgcagaatgcctgccgcagccgctgcgccaggatgggtgggcagcgccacgtggacggttaacatcacgccggccatcggcaggccaaacttcagcggcgacacgtgggcgactttgctgaagccgtagattaacggaatgatgatgataaagccgacttcaaaaaagaccggggtgccgagaataaaagccacgatggttaaggcggcaatggttcgttttgcacccagtacgccggtcaacgttttcgccagcgattcggcgccgccggacatttcaatcagtacccccagcattgagcccagaataataatgctggcgatgtggccaagcaggccgcccatgcctttttcaatggtggttataattttatctgccggaatgccggtggcgaatgccaccagcagactgacgatcaggagcgccacaaaaggatgtgctttcgctttgatcactaacaggagcaacagcactacgctggctaacgcaataagtaacagcgccgatgtcgacataggtttgcctcgggtattaacaggtgtacagagagttatttttttagaaaacggcgtttattttttccggtagggcgagaaccaccccagcccggaaagcgtgtctgtccgggggatatattcgcagccgatccagccgtcataaccggttttatccagtagcgcatagagccacggatagtttatttcgccctcatccggttcatgacggtcgggcagggaggcaatctgaatatggcgatactggccggcatattcggtaataagatggcttaaattgccgtccaccttctgcgcgtgaaacagatctaactgcaccgccaggttcggcctgtcgacccgtttcaccatcgccagcgtctgatattgactgtggtagagatagcccggtttggtctgcggattcagtgcttcgatgagtatccgcttgtcgtggcgggcaaagcactccgcggcgtagcgcagattaccgataagcacggcctcgcaggctgcgcgatccgctcccggcggcaccacgccggccatgatatgcacctgcgggcaaccgagctggcaggcatactccagcgccagctcaatatcgcgtcgggcctccgcgcttctcccggggatggcggcgagcccccattctccggcgttgacgtcgccgggtggggtattgaacagcaccagctgcagctggttctcctgcaggcgctgtctgatttccccggcggcatactcatagggaaacagaaactcaacggcttcaaatcccgcccgggcagcggcggcaaagcgttccaggaacggcagttcggtaaacagcatggataaatttgcagcgaattttggcatggttttatctcagttcttttacttcgtcagcggtcaggtagcggatctcgcggttgccgagggtaaatatcagccgtgcggtctcttccagttcctcggtattgttggtggcttcgcgcagcgatgagccagtaaccaccggtccgtggttggccagtaaaaaggcgttatagcggggcgccagcccggccagcgcctgggcaatacggtcatcgcccggccggtagtagggaaccaccgggacgtcgccgacgcgcatcaccacatagggggtaaaggggcggatacagttgtgcggatcgagcccctgcaggcaggagagcgcggtcagatagtggctgtgcaagtggacgatcgccttgcaggccgggttgtgcaaatagaccgcccggtgaaaagtgacctctttcgacggtttgtcgccggagatccattccccttgcagcgtcaccaccgacaaccgctgagcctgcagttcgccgaggcaggcgccggtcggcgtcgccagcaggttgccgtccggcagcagcagcgacagattgccagcggagccggtggcatagccgcggctaaataacgaggcgccaatctgcaccatttcctctcgcagttgttgctcagtcatgacgaaactcctgctgggcacgggcaaagaactggatatcgccgaagttacctgacttcagcgccagggagagcggctggcgggtgtcacgcacccagggcacgccaggggagatggtcggcccaatatggaacgcctcaacccccagggtctgcgccacaatgctcgacgtttcccctccggccacaataaagcgggtaaatcctttcgccttcagggcggcggcaagagcggcaaacagctgttccacccgttcgctgctggccttgtcgccatactgcgcctggatccgctgcagcgtttgcggctcggtggtggcatagatcatcggcgccagcggcgcatcgcgctgcgcgtccacccagtcagtcagcgtcctgacgtagctctccagatcggtaaagcaggcgcttaagtcgacggcgcgggcgggggcctgttgacgataggccgccacctggctgttggtcatcaccgagcaggagcccgagagcaccaccgccgggccgactagcggcatgccggcctgagcgctttcaccccgggcgccatggcgctgcgcccagtcgcgggcgaggccgatggcgaggccggaaccgccggagaccagcttcatctcccgcagcgccacgccctgggtgagcagatcctgttcactgagggcgtcgagcaccacatagcgcaccgccggatcgttgactgccgccagcgcggcggcgaccgcctccggcccccgggcgacaatcggccaggcaatcagcgcggcttttccgcgcccctggcgctcaattaagcggcccaggtgcgcatcctccatcggcgtcaccggatggtggcgcatcccggactcattcagcagttgctcgccgacgaacagatatccctgatagaccgtgcggccgttaaccggcagcgccggggaaatcaccgtccgcgtctcacccagctcggccagcagggcatccagcaccgggccaatgttgccctgcgcggtgctgtcgaaagtggaacagtacttgaaataaaactgctgacagccctgggcctggagccagctcagggccgccagcgactggctgacggccatttccgccgggcaggagcgggttttcaggctgatgaccaccgcctcgctggtcagcggaagatcgcgggtcggcacgccattcagttgcaccgtcggcatgccgttgcgcacgaggaagctggcaatatccgtggcgccggtgaagtcatcggcaatgacaccaagctgcatgttgtctctcctcactgtttatggcccggcagggtgatgccgttgaaaatcttgatcaccgcgctgtcatcttcccgaccgaatccggcattactggcggaggtgaacatattcagcgcggtggtagcgagcggcagcgggaaggtcagcgcccgggcagtgtcattcaccagcccgagatctttgacaaaaatatcgacagcggattttggcgagtaatcgccatccaggacgtgctgcatgcgattctcaaacatccaggaattacccgccgcgtgggtgaccacgtcatacatcgtctccagtgggatcccggcgcgggcggcaagcgccatcgcttcggcggcaacggcgatgtgcaccccggccagcagctgatggataatttttaccgtcgagccaagaccaatgtcgctcccgatgcggtaggctttgccggccacggcgtccagcaccggcgcgaggcgggcaaaggcggcatcgctcccggaggccatcaccgtcatgtcgccggcggccgctttcacggcgccgcccgataccggcgcgtcgagcatcaatagctggtactccgccagcgcctcggcaatggcctgagcatcggcggaggcgatggtggacgacaccatcacgacagtgcccggcttcagatgggcggcgaggccgctctcgccgaacaggatcccccgcacctgggcggcattgaccaccagcagcacaactgcatccagttccgcggcgaacggcaccgcgctggggcccgcgcctttggcgcccgccgccagcagtgcgcgacagttgtcgggattgatgtcaacgccccaggtgttcaggcccgcctgcaggcaggcgcgggcggcgcccatgcccattgaacccagtccaatcacgcagacgttagtgtgtgcagccatgctggtctccttgtgaacattagttaattaatgtgatttaatgatagaataaagcgttatcatgtgaatttatgtgagagttatcacgaataacccacatgaatataaaaaattcacaggcggaaagaggctgcacaacggcgattcttgccctaaaatagcctaaaaacagcggcaaagcgcgataacaacaccgggtgtcgccagggccgtagcctgggtggtgacgcctggtgtgaaaaaatggtaaggggagagcggtgattccaatagaacgacatcagcgtattttagccctggtggagcagcgtggggcggtaagcattaacgagctgacggagatcctcggcgtgtcccatatgaccatccgtcgggacgttagtaaactggaggagcaggggctgctggtcagcgtctcgggcggcgtgcgcgccgtcagccggctggccgcggaacccagtcatctggtgaaaagcacgctgcagagtgaggagaaacaggcgatcggcgcgctggcggcgagtcatatcgccaaaaacagttgcatttatctggatgccgggactaccaccctggcgctggcgcgggcgatcctcgaccggaacgatctccaggtggtcaccaatgattttgagataacccagctgctgatcgatgccagccagtgcggcgtgatccacaccggcggcactctgtgccgggagaaccgctcctgcgtgggcgaatcggcggcgcgtacgttacgccacctggctatcgatacggcctttatctccgccagcggctgggacagtcgcgggattttcacccctgatgagaacaaggttaccgtcaaggagaccgtcagccaggtcagcgcgagaagcatcctgctgtgcgacagttcgaaatacaatcaggtggccacgttcatggcgttacctttgacccggttcaccaccatcattaccgaccggcatctttccgatgccgccgccagtcatatcgcccggcacgcctgcgaggtgctacgggccggataacgcgcgcggccaccgccgggttagcgttgccagtgctcgatcagcgccgcgccgatcccggcgatttgctgatttcgctcggccatactcgccggcgtatcccgcagataaatcaccacaatgcgctctgctttgttattcgggccaagcagggcgacaatcccgcgcgcaccccgttcgccagctccggtcttatcggcgataaaccagcccgccggcagcacggagcggatcaacggtccggcgacccgatcgtccaccatccactgcagcagctgccgttgcgaacgggcgctcagacgctggctggtcagcagcttgcgcagggtcgcggccatgctggccggggtagtggtgtcgcgggcgtcgccgggaagcgcctcattcagttccgtttcccagcggtcaaggcgggtgacgttgtcgccgatctggcgcaaaaaggcagtcaatcctgcggggccgccgacggtggccagcagcagattggcggcgctgttatcgctcatggtaatggcggcggcgcagagttcgccgaccgtcatgccgtcggcaagatgtttttcgctgaccggcgagtagtccaccagatcctgctggcgatagtggatctttcgctccagctgttcgtcaccggcatccacccgcgccagcactgcgccgcagagcactactttaaaggtgctcatcatgggaaagcgttcatcggcgcgccaggcggtcagcgtgcggccgctggccagatccatttctatcatgcctacgcggcccgacagctggctttcgctttgtttaatttgctcaagcggctgcgggctggcgtgtaccgccagcggcagggtggctaacagggagataatacacaggcgaatataacgcataaccacaatacatccttgagtgagggccgataaaggcgagtaaagaagcgacaaataagaataacccggcgttttgctgattcacaattcctcttttttccttcatcatttgtcatcttttatttcgaataatcaatatctagccctgcctaagcacgctattttttgactcaaggccgtgatgaactataagaaagtactaaataccgcactctgtcgggcgtcgctgtttgccgatcatcacgcccgccggtccctgcggttcgccaacgctatatgccatcccgggaggaactggtgcacccgataattaaggtcatgctggtgggcggtaaggcggacgggctgttggtcagcgtcgccgatgacgcgaccgaggtctcggtgacgcctgcgcagtacggtgcgctatccgggcaaccgttgagctaccgaattgttagccaaaccattgacgatgaacgctatttttttggcgttttcagcgacgcccatcaggatagcgataagctgacgcgggtcgccctgacccgtggaatgaaaaaaaagttctgttaaaccctgcccgaaagggggcgtaagagggtatgccgggcgccgctgtgctactgtggcagccttctatttccagggccggacgcataatgattcagtacattcgtattcaaaattttcgctcagtgaaggatatcgcgctggagctcgggccgctgaacattgtcttcggccctaacggctgcggtaaatccaatatttataacgccatccacctgctgaccgctgccgctgagggcaggctttcggggtttatcagcgaagagggcggtctggagaatatgatgtggtccggggagcgttcgcccctcgatcgtcacccccgccggctgcaaatcgcctgccggaccgacagcttcgattatgagctgcagataggcttccctgaaaaattgccctatccgacgcaattcatgctcgatcctatcgttaaagaagagaatatctggctggccggctactcccgccggccttcctcccgcgtactgcagcgcaagaatcaggcggcgtttctcgtcgatgtcaccggggagaaaagtactttcaccgagagtatttatgaaaatgagtcggtgttcggtcagcttggcgagccgcaccgtttccccgaagtatcgcgagtgcgggagaccttgcgccgttggcggttttatcatgaattcgcgattggccgtcattcgccgctgcgtcagccggccgtgggttaccgttcgccagtcctcgacagcgatggccagaatctcgccgccgcctttcagaccattgtcgagatcggcgcggaggagattttgcatgaaatccttgccgacgcctttcccggctgccagttttattgtgaaaacgagcactcgcgtttcgctctgaaaatgcgtcgcgaagggatccgccgcccgctgctggcggcggagatgtccgacggtacgctgcgctttttgtgcctcgccgtcgcgctgctcagtccacgcccgccggcgtttctggcgatcaatgaaccggagaacagcctgcatcgcgacatgttgcccgcgctggcccggctgattatcgaggcctcgcgctacagccagatctggctgaccagccactcggcggagctggcggagcttatcgccgccggggcgccttgtcagcgctatgcgctggagaatcgcggcggggagacgcggattgtcgagtgaagcccgtcatccctgacgggggcgctggagtcaggcggggctctgcgtctctgcggtcggcagcagacggttgccgccgcgtagggtgacgaacgagagcagggtgaagctcagggttatgcagccgaggatcagataggcctgatggaagccgacggtgtcgtacatccggcccacccaggcggaaagcaccaccccggacaactgttttgacagattaaaaccgatcaggaacagggtggccgagaggcgcgggttaaaggcggaagagatatatttaaaagttcccaccagcaggaaggggatctcaaacatatgcagcatcttgaggatcaccacctcgactgccgatgaggcgaaggacgacccgagaatacgcaccgacatgatcatccccgcggtcagcagggcgtttttggcgccgatgcggttaacgatggccggcgcgcagaacatgatcagcgcgttgagcaactcgccgccggtggtgacgaagccaaacacttcggtaccgcgctgcggactggcgaaaaagcttttgaaaaagttggcgaactgctggtcaaacacgtcgtagacgctggcgacacccaccacatagacgataaagccccagaagcgcggcatacgcagcagctctgccgccgtacgcagcgaaaaggcctggcgattggcgcccagcgcctcgataacctgggcgctgttgctgctttccggccgcgacagccagagcagcagaccgagcaccagcgcaaagccggaggcgatccagaaggtgatattgggatcgatgctgaacagcacgccggttatcgaggcgcatagcgcccagccgacgcagcctgcgacccgcactttgccatattcaaagcggttggcccggctgacgcgttcgatataagcttccaccgccccggagccgctggagaaaacaatccccaggtagatcccgcctaccagcgaaccagcgataatattcatctgcagcagcggagagaaaacgaaaataaagaatggcgcgaacagaattaacaataccgtaatggtccacagcagatgtttgcgcaggccgagcttatccgacatcaggccgaacaccggctgaaaaataatggcgaataacgagatagacgagaaaacgatcccggtttccgttttagttaaatggttaacgtccgccagccacaccggaaaaaacgggaagtaggccgacataatgaaatagtaaaagaaaaagaacagcaggaaatagacgaaattatgccgttctcgtggcgccagttctgagaatttcatcaccatgatcccttgttattctgtttgtggggtgggggctgtcgcccccacggattaaaagcaacgcaatgagacctcgtactgccagcgcgtttggctcaggagccactgcggcagcacgctgggggtccaggagtcatcgcctcccacccccatatgcaggccgtcgagggtgatccacacgccgtcttcggcctgcatcttgtgccagtggtcggtctccatcagctgacgggtgctccatggctgaacggagaagtggaaatgaccgctgatgtgccagcgcccccagtccagcgcctgggtatcacagcgcaggccgttttccgtcgggaagatgtagggggtggtcatcgccgccagcggctgctcccagcgggcgaagcaggcgctgctccgccggtcggggtagttctcatgcggccccagacccagccagctcaccggcgcctgctgatccgccacctggaagtgcagcccgacccgcggcagcggcggcagggtttccgcctgttcgccgtccactgccaaccgcagggttccgtcagcagtgaagtgcatgcgccagtggctgacaatcactacctcttcgccgcgcaggtagtgccagcggcagtcgacgagggtttcatttgccaggcgctgcgcatcgcactggacgcagtgcgcctcaagatcgtacaggccggcgcttttccagcgctccacccaggcgttggggtcgatacgctctacttcgctgaccccgatgtcgttgtcgagcggcgcgcgaataaactggtcacgcaggggggtcaacagctgctcctgaccgccaaccgaccagcggctcagcagacccgtccggcgatcgatggtccagcattgcgaaccggcgcggatctgccagacctcatcgctgacgataagatccggagcgccggcagacacggtgggcgccggcagcgccagcggggcgggcaggggaaactgttgccaggcgacgcggtgctccgcttctgaccaggcggtcgcctggggctgggtcacctccagcgtcagccacaccgcgcgggcgccttcaggcaggatcaggctatcgagcagcgttatctcgtcgctgccctcagggggcagcgccagggtcaggtcgccgtgatacaggggttcaccggccgcctgcacctgccagcgcagcacttcgttatcggttgggcggaacaggtattcgctgatgatgcgcacccgcagcggcgaggtcgacagcagcgtgaactgaaaatactgctgggcgtgcttcgcctccaccagcgacggatgcggcgtgcgatcgggaaacaccagaccgttcatacagaactggcgatcgttaggcttatcaccaaagtcgccgccataggcccagccgacgctgccgtcggcaaaggttttgcggatcgcctggtcggcccagtcccagataaacccgccctgcagccggggatactcgcgaaaggcctgccagtaatcggcgaagttgccgaggctgttgcccatcgcgtgggcgtactcgcaaaggatcagcggcctctgctcaccgggcaggctgatccattttttgatcccccatttgggtaccgccgggatcggctggtcgcgttcgacgcgggcgtacatcggacagataatatcggtggcggtggtatccgcgccgccgccctcgtactgcaccggacggctcggatcgttgcgtttcagccagtggtacagcgcttcgtggttgccgccgccgccggactcgttgcccagcgaccagatgataatgcacggatggttgcggttgctctgtaccatccgggtgacgcgggcgctgaaggctggtagccacgccggatcgtcggacagccgattcatcggcaccatcccgtgggtttcaatattggcttcatcgaccacgtacagaccgtagcggttgcagagttcataccagcgcggcgcgttgggatagtgcgagcagcgcacggcgttaaagttgttctgcttcatcaacagaatgtcctgcaccatatccgcctcggtgaccacctgcccgcgcaaatgatgatgctcatggcggttaacgccgcggatcagcagcggtttaccgttgagacgcagcaggccatcggcaatctcgatgcggcgaaaaccgatgtcccacgcttcggcctccagcagttcgtcgccgcgccacagggtgaccacggcgcgataacagttcggggtttccgcgctccagtgcgccggcgtcgccaccgccagggagaaatcgacccgttccgcgtagtggccgcgctcatccaccgtcggggtacctaacggctgccgcccggcggcgatctgctcctcgccgcgccacaggctaaccccgacgctaagcccggcaagcgccgcctcagtcgcttcgacggtcgcctggacctgcagagtgccgtcgcgatagagggcgtcaagggctggcgtcaactgcacgtcgcatagccgttgctgcggcttattcagcagccataccgagcggaaaataccgctcatccgccacatatcctggtcttccagccagctgccggcgctccagcgcatgaccatcacgcacaggcggttgtcgcccggacgcagaaaggggctgagatcgaacgccgccggcaggcgactgtcctgcgaatagccgacccacacgccattgcaccacagatgaaacgccgagttgacgccatcgaaaataatctgcgtttgcccgttctcgcgccatgtgtcctcaaccgtaaagtgcagggagtagcagccggtcgggttatcctccggcacccgcggtggggtggtgtcgatgggatagcggacgttggtgtagatcggcgcgtcatagccctccatctgccagttggaaggcacaggcgtgccgcggcagtccggtagatcctgcgtcaaccactgcgcatcgacggcaaacgggctgcgggcgtaagagaactgccactcgccgtccagttgacggcggcgggatgaaggtaggttatcgcgggcggcaagctcatcgcgccagctggcgaaaacgggatgcgctggcaggcggttaaggtgggtaatggtctggttctgccagtcttcacgggcgaggacggcgtgaaagtcaggagtgtggctgcggccggtatcgctaatttgcatattaaaccccggtaagtcagaaattgtcgttcgctaaacaggatggttaacgttatcgggtaatttgttttgtccagcaatctcgggggaatcgaaattaacagacgatcacgaaagcgggggagaagcgctgttttttgtcgcgcgttaaacataaaatgttagcgcacgacattgttattgctgaggagaaaagatgccgcgtcgtaccgcaaccctggaggatgtcgcccgcgccgcgggcgtgtcccagcagacggtctcccgggtgctgaaccgtcctgaggtggtgtcagcccgcacccgcgagcaggtgatccgcgcgatgcaggcgctgcactatgtgcctaaccgctcggcgcagctgcttgccggcaaagcggcgccctccatcgggctgattaccgcctcgctgacgctgcacgccccctcgcagatcgccgccgcgataaagagccatgccagcctgcatcagctggaagtggcgatagcgatgccggcgcaggccgattttgtcgcgctgcaggcccggctggacgagctgcgcgcccagcatattcgcggggtgatcgtcagtctgccgctggagagcgccactgccgagcggctggtgcaagacaatccggatatggcctgcctgtttctcgatgtctccccggaggccgatgtctgctgcgtgcgcttcgaccaccgcgatggctgcggggcctgcgtgcgccacctgtgggagctggggcatcgcgaatttggtctgctggcgggaccggaaagttcggtttccgcccgtctgcgtctcgccagctggcgcgaggcgttgcactgtctgaatattgcccgctctactacggtgtttggcgactggagcgccgccagcggttggcagaaaactttcgagctcctccacctgcagccgcggatcagcgccatagtggtggcaaacgatcagatggcgctcggcgtgctcagcgcgctggcccagctcaatcgcagcggcagccaggcggtatcggtgaccggctacgatgacaccgccgacagcctttacttccagccgccgctcaccacggtggcgcaggacttcgatctgttgggcaaaagggcggtggagcggctgattgccctgatggcggccccgcagctgcggatccgcgagctgctgccgacccggctcatcgtgcgccagtcggcctggcctgtcgccgccgcggaggaccggcagcagaccctggcgcagctgaaagcgctggtggagaagctttagctgctggtcgttgaggctttattgaagttgagcatgctaacttcggcagcaaacgtagagaggtaaagcttatctgtctgcgaaaaatgcaaaacacaatctatccatgcaagcattgatttaccgccagtcatatggcggtttttttttgccccttccaccctgtaccgactgcttcagtccggctttccatctggcatatcctgccgcggcatgctagatcttgcttccgggagacgacgggagacaaggtcatgatggtgattgagggtaaagaggcgatcgtgcgggtggactggcagcgagtgcgaacgatcatcgccgaggccgggctgaatgagcgtgatgttcagcaactggagcaggcgttccgccagagcaccttctgctggtttggctatgagaacggtcagctgattgccgtggcgcgagccatcagcgactgcacctggagcagctatctggcggatgtggcgatcgtccccgctcgtcagggacagggctacgggcaacagctgatgctggccatccgggagcaactcctgccctttggcaaaatatttatctatgcggtggccgataaaattacgttttatcagcgctttggctttgccatgttgactaccggcatggtctgcgccagcgaggaaggcatgcagaaaatgcaggagcagggctatatccgtcagccctgaaaggtgacgcttagaaacgcctggcttaaacgtgtaaaccaggcgcaggctgtcagagggggcgttcgagcacgaaaagatacgcttcccgcgaccagaacagggcggtacggcggcgctccaccgacatggttttcacttcccatccctcacgggtatagctgctgagaaactggctcattttgtcagggtcggccttggcttcgccaaaaaacagactgcccagcagcccctctttatagatcactacccgacactctttcttcatcatcgaccctcctggcgaccggtttactgtggccgtctattgtccgtggctgcgacgattttgcaatcggagaaggcgtaaactgtttacggtactgcagcgggctgagcgcgaagtgctggcgaaaatggtggcgcagggtgccggcgctggcaaacccgcagcgctcagcgatctgatcgatgcccatcgtgctctccgtcaggtgctggcgggcgcgcagcagtcgttcctccagcagccagcgggcgggcgttttaccggtggcctcctcaaagcggcgcaaaaaggtgcgcgtccccatgccggcgcgctgggcgagggaagcgacggtatggctggcggcaagatgctggtgcagatagtcaaacagctgaccgaggcgcaggctctcccggctgcgggctaccgggcgcaggacctgctgcgcctgaccgccgtcgcgatggggagagacgaccaggcggcgggcgacgacgttggcggcttcgctgccgaaatcttcacgcaccagatgcagacaaaggtcgatccccgccgcgctgccggcggaagtcatcagcaaagcatcgcccacgtaaaggacgtcctccaccacctggatctgcggaaaacgggactgcagcgccgcggtgtagcgccagtgggttgtcgcctggcggccattgagcagcccggcggcggcgagaacgaacaccccggaacagatagaaataatccgacatccgcgggcgtgggcggaagccagcgcggcgcacagcgcctcggggaccggggcgtcgacgccgcgccagccggggaccacgatcgtatccgcctgggcgagaagttcaggaccgccgtcggtcatcaggcggatgccgccggtagcgcacagcggcccttcatcgacggcggcgacggcgaactggtaccagttgtcgcccatttccgggcgcggcaggccgaagatctccacggctacgccaaactcaaaggtgcacaggccatcgtaggcgagggcgatcacctgatgacgtgacggtgtcacagaaggggttgtcagaatgttagcgttttctgtcatggttgtcggcagatcagggtgatgggcgtcagtaaagtagtgttatcacagacaaggagaagacgccatgagtgtagtaacccaatttccccctgccacctccgctgaggctatccgctggttcagccataagctgcatcttgagaccgactgcgccgatgtgcacagcgcccagcgtgccggcgaggtcgacttcgtcctgctgcacgtggtcggcagcgaggaagctttcgccagacgtcacctgccaggcgcgcagcatctcccgcacagccagatcaccgccgagcgaatggcggcctggccggcggagaccctctttgtggtctactgcgccgggccgcactgcaacggtgctgacgttgccgcgctgaagctggccgagctggggcggccggtgaaaatgatgctcggcggactcaccggctgggaagatgagggctatgcgtttgtttccggtaaatgaaaatttttcatgtaccatgaaatattctcgtttgcgacccaccactctgcatgccagtatctggacatatagccatccagaagtctaaaaattcaaataatgaactatcacggtgggcaactaacgcgcccaccgctaaggagacagcatgcaacgtcaacaggccccgttccgcgcagacatcgtcggcagttttttgcgcccggacagcattaaacaggcgcgtcagcagctggctgaggggattatcgacgccgctcagctacgcgagattgagaataacgcgatccgtcatctggttcagcagcaatgcgactgcggcctgcatgtggtcaccgacggtgagtttcgtcgcgcatggtggcatttcgatttcttcgatggcctgcagggcgttgaacgttacgatgccgagcaggggatccagttcaacggcgtgcagaccaaagcgcacggcgttcgcgtcaccggcaagctggcatttggcgaccacccgatgctggaggatttccgctatctgaaaagcatcagcggcgacgcgcagccgaagatgaccattcccagcccgagcgtgctgcacttccgcggcgggcggaaagatatcgatgccacggtctacccggatcttagcgactacttcgacgatttggccaccacctggcgcgacgccatccgcgcgttttatgacgccggctgccgctatctgcagctggacgataccgtgtgggcctatctgtgctccgatgcccagcgccagcaggtacgcgagcgcggcgaggatccggatgcgctggcgcgcatttatgcccgggtgctgaaccaggcgctggaaggtaagccggccgatctgacggtgggcctgcacgtctgtcggggtaacttccgttcaacctggatctcggaaggcggttacgagccggtggccgaggtgctgtttggcggcgtcaatgtcgatgctttcttcctggagtacgacaacgaccgctccggggatttcgcgccgctgcgctttattcgtcccggccatcagcaggtggtcctcgggctgatcaccaccaaaaacggcgagctggagaatccgcagggggtaaaagcgcgactcgccgaggccgcgcagtacgtgccgctcgagcagatctgcctcagcccgcagtgcggtttcgcctccactgaagaggggaatgccctcagcgaagaccagcaatggcaaaaggtccgtctggtgacctccatcgccgccgacgtctggtaattgctttcttagcgcagcgttgcaccgtgatgaggcaacgctgccatcctcttcgccactatcgcccacctgcgccgcatcctgctgttttcacaacctggcaccttttttgccttatcacctctggttagctgttaattctttattttttgcgctactcaggagtgaatcatgcaacgtagaacgttattaaaagcttttgcactctccgcctctgttatggctataggtctctcctttcaggcctatgccgccgacaccatcaaagtcgggatcatgcattcgctctccgggacgatggcgatttccgaaacgccgctgaaagacgtcgcgctgatggccatcgacgacatcaacgccaaaggcggggtgctgggcaagaaactggagccggtggtggtcgacccggcctccaactggccgctgtttgccgagaaggcgcgccagctgctggcccaggataaagtggcggtggtgtttggctgctggacgtcggtctcgcgtaaatcggtcctgccggtgtttgaggaactgaacggcctgctgttctacccggtgcagtacgaaggggaagagatgtcccccaacgtcttctataccggcgcggcgcctaaccagcaggctatcccggcggtggaatacctgctgagcgaggacggcggcggcgctaaacgtttctttctgctggggacggactacgtctatccgcgcaccaccaacaagatcctccgcgccttcctgcatgccaaagggatccaggacaaagatatcgaggaggtctacaccccgttcggctacagcgattaccagaccatcgtcgccaatatcaaaaaattcgccgccggtggcaaaacggcagtggtctccaccatcaatggcgattccaacgtaccgttctacaaagagctggctaaccagggtctgaaagcgaccgatgtaccggtggtggccttctcggtgggggaagaggagctgcgcggcatcgataccaaaccgctggtcggcaacctcgcggcatggaactactttgaatccgtcgataatccgaccaacaaagcctttgtcgccgattatcgcgcgtatgccaaagcgcacaagctgccgaatgccgatacggtggtaaccaacgatccgatggaagcgacctgggtgggtctgcatatgtgggcgcaggcggtgaccaaagcgggcaccaccgatgtcgataaagtgcgcgaggcgatggccgggcagaccttcaacgcgccgtccggttttaccctgaccatggatgccactaaccatcatctgcataagccggtgatgatcggtgaaattgaaggcaacggccagttcaacgtggtctggcagaccgataaacccgttcgcgcgcagccgtggagtccgtggatccccggtaacgataagaaacctgaccatccggtgaaaaccgtcagccagtaagcgccacggccggcggggctggagcatagcgcccgtcggccgctgaccagaggagaacgacatgaacgcattgcgtctcatgaatgtgttggcgctactgctgatcctgctgccatggcgggcgcaggccgcggaggcggacgacttcgttgccgccagtcgcagccagcaggcgcagctgttgagccagtgggcggcagcgccgcaggcggatcgtctgccgctgctgcgggcgttgaccaccgagagcctggtgatggacgacggaaaacatgctttccgcacccgacagggcggattacagccattgggcgctgtcgccgcaccgcagggcgaaacccgaccggtccgtctgaccaacaggctgcgcaatctggctgccggcgcgctggccagccaccttattttaagtgacaacgtcacagagcgagcttccgccgcacgaacgctacagcgggaagcgaccccggccatggccgcgctgctgcaacagcggctgcaggcggaaaccgatgatactgtgcggggtctgctggaggtggcgctggcgcgcctgcagctcgctcagcctgaggccagcgcgcggctggccgccgtgacgctgctcggccattccgcggacccggaaacccaggcgctgctgatcccctttaccgatgcccagcatgagccggatgcggcggtgcgcgaggcggccagcgatagcctgcaaaagatcaaacatcgtctgctgctcggcgatctgctgggccaggcctttatgggactgtcgctgggatcggtgctgttgctggccgcgctggggctggcgatcacctatggcctgctgggggtgattaacatggcccacggcgagatgttaatgatcggcgcctacagctgctggctggtacagcaggcgctggcgcagctcgcgccgcaatggctggccttttatccgctggtcgcgctgccggtggcgtttctggtgaccgccgggatcggcatggcgctggagcgcaccattattcgtcatctgtatggtcggccgctggaaacgctgctcgccacctgggggatcagcctgatgcttatccagctggtgaggatgctgtttggcgcgcagaacgtggaggtggcaaacccggcctggctctccggcggcgtgcaggtcctgccgaacctgatcctgccgtggaaccgactggcggtgctggcgttcgtcctgctggtgctgtcctttacctggctcatcctgaaccgcacccgtctggggatgaacgtccgcgccgtgacgcagaaccgggcgatggccgcctgctgcggcgtgcctaccgggcgggtggatatgctggcctttggcctcggctccggtattgccgggctgggcggcgtggcgctgtcgcagcttggcaacgtcgggcctgaactgggtcagggatacatcatcgactcgtttctggtggtggtgctgggcggcgtcggccagctggccggcagcgtggcggcggcctttgggctgggcattttcaacaaaattctcgaaccgcaaatgggcgcggtgctgggcaaaatcctgatcctggtgatgattattctgtttattcagaaacgcccgcagggtctgttcgcgctgaaagggagggttattgactaatgagccaaccaatcaccttaacgctggcgcagcgcgcgccgcggcctctgcgctggctggggatcctgctggtgctggggctgctgtgtatgccattcctggcgctgctgccggcctcccatccgctggcggtgccgagctggctgctgacgctgagcggcaaaatcctctgctacgccattgtggcggtggcgctggatctggtctggggctatgcgggcatgctgtcgctggggcacgggatcttctttgccctcggcgggtacgccatggggatgtacctgatgcgccaggcggcgggcgacggtctgccggcgtttatgtcttttctctcctggagcgagctgccctggttctggtggggcacgcagcatttcgcctgggcgatggcgctggtggtgctggttcccggtctgctggccctggttttcggctggtttgcctttcgctcgaagatcaaaggggtctatttctcgatcatgacccaggccctgacctatgccggtatgctgctgttctttcgcaacgagaccgggtttggcggcaacaacggcttcaccggttttactacgctgctgggttttccggtcaccgccaccggcacccgcgccagcctgtttatggccacggttttgctgctgttgctgacgctgtggctgggcgcggcgctggcgcagagtaagtttggccggatcctcaccgcggtgcgtgacgccgaaaaccggctgatgttctgcgggtacgacccgcgcggcttcaagctgctggtgtggacgctgtcggcggtgctctgcggtctggcgggggcgttatatgtcccgcaggtggggatcatcaaccccagcgaaatgtcgccgaccaactccatcgaggccgccatctgggtggcgctcggcgggcgcggcaccctgattggcccggtgcttggcgccgggttggtcaacggtgcgaaaagcattttcaccgtggcgatgccagagtactggcagctgtttctcggcctcatcttcatcattgtgaccctgtttttaccccgcggggtgatgggcctgctgcgtcgaggagaccgctaatgcaaccggatgaaggactatttacccgccagctgcccggcgatcgctttcgcgaacaaaccgatccggtgctgcagctggagaacatcaacgtcagctttgacggtttccgggcgctgacggatctgtcgctggcgataggcgtcggcgaactgcgctgtgtgatcggccccaacggggcgggcaagaccaccctgatggacgtgatcaccggcaagacccggccgcaaagcggcaaagcgctctatgaccagtcggtggatctgaccactcttgacccggtggccatcgcccgccagggcatcgggcgcaagtttcagaagccgacggtcttcgaagcgctgacggtggcggaaaatctcgccctggcgatgaagggggataaatcggtgtgggccagcctgcgcgcccggctgagcagcgaacaggacgatcggctgaatgaggtgctgcgcctgttgcgtcttgacggcgagcgctaccgccaggccggtctgctgtcccatggtcagaaacagtttcttgagatcggcatgctgctggtgcaggagccgcatctgctgctgcttgatgagccggcggccggcatgaccgatgcggaaacggagtatacggcggagctgtttcgcacgctggccggacagcactccctgatggtggtggagcacgacatgggatttgtcgagaccatcgccgaccgggtgacggtcctgcatcagggccaggtgctggcggagggatcgctgcgggaggtgcaggccaatgagcaggtcattgaagtttatctgggacgttaaggagcgccaatgttacaggtgagtcagctacatcaatactacggcggcagccatattttacgcggggtggatttttccgcccgccagggcgaagtcacctgcctgctggggcgcaatggcgtcggtaagaccacactgctgaaatgcctgatggggctgatcccggcgcgcagcggtgaggtacgctggcaggatcagaacatcacccatcgcaaaccgcaccagcgggtgcaggccggggtcgcctacgtcccccaggggcgcgagatatttccgcgcctgacggtggaagaaaacctgctgatggggctgtcgcgctttcccgcccgcgaagcgcagcaggtgccggaggagatctaccagcttttcccggtgctcaggaccatgaagcagcggcgaggcggtgacttatccggcggccagcagcagcagctggcgatcggccgcgcgctggccagccgcccacagctgctgatccttgatgaacccaccgaggggatccagccctcggtcatcaaagagattggcgaggtgatccgccagctggcgagccgcggagacatggcgatcctgctggtggagcagttctatgactttgccgccggactggcggaccactacctggtgatgtcgcgcggcgccatcgtccagcaaggcaagggtgatgatatggagagcgacggcgtgcgcgcgatggtgaccatctgaccatgccggcggcggtcgcgccgccggtttgcggcctatttgcgcagcagccgctgcaggcgcgcctggcgccagtttttaatccattcgccgaacacgaacaggcgtaatcctctcaccaccagcagggcgccccagatcagggcgacccagccggaccagtagtactgtggattagtgaagcggttaagcaccgccagcagcacgcaaaccaccagcgccaccgacagcgaacggaaaaagcggctctcctgatgcacccgcgctttggcttcctctatgcgcagatccagtgaggcttcctggcccggcgcgtcttcccgccgggcttcgccgccgatctcggccaccgtcacttcaaagaccgcggcgagggcgctgagggtctccagccccgggcgttcgccattctcaatgcgctggatcgtgcggacgctgagacccgccatttcggccagctgctcctgggaccaggcgcgctgcagccgtaattgtttgacctgattgttgctgttcatattcgtatgctccataacgttctgcggatgtaaacctgtgatggagtatggtgaaccgggccgccagccaccacgacagcgacccgacaacggcccgacagcaacctgacagccgcatgccagctggcgtcaggcgttggccagcggagaatccggttgccaggggcgggcattgatcccgcggaaaatcatcagccaggcggcgacaatcgccacgataagaatgacaaaaagcgaccagtgcggcagatgggtgaggatcaaccccgtcagcatcgggttgaatgccgcccccagccaccccagcgactgggcggagaagtagcttgccttcatccccggcggggcaatatggtcaatcagcatatactccccgggggcataaatcacttccccgagggtgaagatcgccgccgagatcccccacgcccacaggctggcgccagagaacataaagcccacaaggccgatcacaaagcagacggtgccgaaggtcatcagcgggcggatatttctcgcgctcagccgccggccaaccgcgtactgcagagcaaccaccaccgcggcgttgaccggcagcaccacggccaccactttctcggcgaaatcgctgctggcgaccaccagcacatactgcgagagacaggaggcgaaggcgccgccgacgaaggaggccagcagcccggagcaggtaaaccacagcagcgcccggtcgcgcagcaacaccgaaggcgaccagggagcggcgcccggctgggccgcggcggcgccatcccgctgaagaaacagctgaataaacaccagcggaaaggcggcgcaggcggccgccagccagaacggcaaattgatactgtgcattaccagcagggtgccgatgggcggcccaacggtccagccgatgttgaggatggtgtagttcagcgagaagatgcgcgcttttttctctgccgtcagccggtcggcgaaccaggctttcaggacggtggaaaagaccgagtaggcgcagttgatcagcgcaaagaagatcaccaccaggggggcgttattgaccagcggtattgcgctgaagccgagaataaacaccagcactgaccacaccatatagcgctttttatcgaacctgtcagcgaggatgccaaaacccatgctgaacaacaccccaaccaccagcgccagcgacagggcatagccaatcacatccacttccagctgaaagcgtcgggtgagatagatggtcataaacggcagtgtggccccgcggccgatagtcaacagtaacgacgatgccagcagcgcgatggtggagcgccggagagtggtgatcatgatttccttgcctgtcatgttgttataattttatgtcttcgatcacaaataacacggccattacgccttgtacaggtcatcgcggtcgacgggcgcacttccgggcctgccaaaaataatgatctatcccgtcggccgctttttcgctactttgattttgttcacaaaaattccaataacgacagaggcaggggtatgacgaggaaagatggactactggcgctgctggtagtggtggtgtgggggcttaactttgtggtgattaagctggggttgcacaatatgccgccgctgatgctggcggggctgcgctttatgctggtcgccttcccggcgctgctgtttgtcgcccggccagctattccgctgcgcctgctgctgggctatggcctgaccataagtttcggtcagttcgcctttctgttctgcgctatcggcctgggtatgccggccgggctggcctcccttgtgctgcaggcgcaagccttcttcaccatcatccttggcgccttcgtctttggcgaacgtctgcagggcaagcagctggcggggatcgccctggcgatctttggcgtgctggtgctggtggagggcagccttggcggggaacatgtgccgctggtgggctttatgctgaccctcgcggcggcgctcagctgggcctgcggcaatattttcaacaagaaaatcatgtcccagacgagccggccgccaatcatgtcgctggtggtctggagcgcgctgatcccggtgctgccgtttatgctggcctcattgttgatcgatggtccgcagaccatgctggcgagtctgcaacacatcgatctgctgacgatactgtcgctgctttatctggcgtttatcgccactatcgtcggctatggcatctggggatcgctgctggggcggtatgaaacctggcgggtggcgccgctgtcgctgctggtgccggtggtgggaatggccagcgctgcgctgctgctcggggagacgctgagcggactgcagctcaccggggcggtgctgattatggccgggctctacattaatgtctttggcttacgtttggtgcggcctggcatggcgcgcggataaaaaaaagccccggagacggggctatacacaattatgcgtgtaatggcatcacaggtcgtgctgctggtagtacggcacgccaagttcgtcagatttatcattaccagccgccatatgattgaaatcaaacggcgaatcattatgttcggaagggataatcattgtatcacgctggttttgacgcaccggcgtggtgttttgctccgcatagctgaggctggaggccagcgacaagagtacgatagctgcggcagcgaatagtttcatgatttcctcaatacgtcttttatagtgcaggcgattaacatcagttatttagcggatgtagatagcgggattcgccaggtacattcgttatgcgatacttgtggggcggaacatcgaaatagttcttgaacgttcgcgtcagggtctgctgcgactcgaaaccatagcgttccgccaggtacaggattggctcattactctgcttgagcttctgcgcaatctccgtcagcttgcggctgcggatgtactggccgagggaatggccggtctctttcttaaacatacgttgcaggtgccacttagagtaaccggagcgctcagacactttttccagcgacaggggcgattccaggttatcctcgatccacgacaaaatactatggatagtgatggcgtcattattacgtctggacatcatcttacctcttcttatttttacggcaggaccttcttgagcagttgctcaagcatggcgacttcgtccgccgacagatttttcgttaactcctggtgtaacttctgacccacaacctgatgacactgctcgcaaagggctgcgccgtccggcgtcaactgcaccagcacgccgcgcttgtcagcggggttgggtaaccgtttaatccagcctttgcacgccaggcggtcgagcatgcgcgtcattgcgcccgggtcgacggaaagcacggttttcagctcaacgggggtaatacatacttcgcaacgaatggagcagagcacgcgaaactgggtcgcggtaatatccataggtgagaggtagtcattgagcaggcgatcttttttctggttaaccatctggatcaagcgacccagcgggatcatttcattaaacaggtcgctggtacttttcataatggttgcccaggcaagtaattagttgcaagtgatactattgcccaggcaatcataagtcaacattatgaattggccgatgccacgatttgctaaaatggaaaagtacgatgtgggtcactctttatgatttttctaacgcttgttatttttttgcagaagtgatttatcagcaggctggcgtcaaatttgttgaagccgacatactcacggaatgaaaccattcttaaaaaatgaatattaacgggactttaattaactatgttcgatttgtttaaagcaatagggctcggcctggcggtgcttttaccgctggcgaatccactcacaaccgtggcgctgttccttggcctggccggtaatatgaacaacgccgagcgtaataaacaggcgttaatggcatcggtgtatgtcttcgccatcctgatggtgtcgtggtatgccggtcaggtggtgatgaatacattcggcatatcaatacctgggctgcgtatcgccggcggattgattgtggcctttatcggtttccgcatgctgtttccccagcaaaaagcccacgattcgatggaagcgaagatcaaatcggaagaactgcaggatgaaccgaccgccaatatcgcctttgtgccgctggcgatgccaagcaccgccggtccgggcaccatcgcgatgattattagctccgcctcgaccgttaagcacggcgtggacttcccggagtgggtggtgctggcggcgccgccgatcatctttttgctgttaggggtgattctgtgggcttgtctgcgcagttccggcgcgattatgcgtctggttggcaaaggcggcatcgaggccatctcgcgactgatgggctttctgctggtctgcatgggcgtgcagtttattattaacggcgtgctggagatcatttcgacctggcatccctgaccgcccgcgatgcgcagagaaaaaaagcccgccggcgcgataccggcgggcttttttgtgcgacggaatcaggagtggtgcggctgatggtcttccagcgataccggccagcgacggaatatcatcagcgaccagaccagcgcgaccagcgccggaatggcgccgacgtagccgacggaggccatggaaagatgcagactcacctggctgccgaccagcgccccggcgcctatgccgatattaaagatgcccgagaacagagacatggcgacgtcggtggcatccggagcggaggccagcactttcacctgcatgccgagaccgataatcatgatcgccaccccccagaagatgctgagcagcatcaggtgctgcgggttatgcgaggccggcagcagcagcagcaggcaggcgagcagcagggcaatcgccaggcttatcagccccgacgcgtgctggttaccgagtttaccgaacagaatgctgccgataataccggccccgccaaggatcagcagcagtacggtggcaaagttgccgctcaggcccgctaccgtctggacaaagggctcgatatagctgtaggcggtataatgggcggtcaccaccaccacggtcagaatgtacacgctgaccagcgccgggcggcggaacagcaccggcaggcttttcagcgagccagaatgttcgctcggcagggtcggcagcagttttacgaggcaggccagggtggctaacgcgccgaggccgatcgccaggaaggtcatccgccagccaaagtactggccgataatgcgcccgatcggaataccaaacaccatcgccagcgctgtaccggtggcgatcaggctcagcgcctgcgcccgtttgcccggcggggccatgcggatggccagtgccgacgttatcgaccagaacactgcatgcgcaaaggcgataccaatgcggctgatcaccagcacgtcaaaattccaggcaaaaaacgacaggacgtggctggcgataaacagaataaacaggccgataagcaggcgccggcgctccactttgctggtcagcagcataaacggcagcgacattaacgccaccacccatgcgtagatggtcagcatcatgcccacctgggcggtttccatgccgaagctgtcggcaatatccgacaacagaccgaccggggcaaactctgtggtgttaaaaataaacgcggcgatggccaacgtcacgacacgtagccacgctaccttgcgtgagaccgtattcgtagtcataagctctggactggtgattcagggaaagatgtgacgctgatcttaaaacgattgttggcgaaaagacaatcattttgtgatctgcgtctcatttcatcgcaaggggctggccgcggttaagcgattaattttgctatggatagtgtcaagggggcgcttttatgtcatgttgaaggaaagtaaaaaaagtaaggacagggtatgcaggaaattcaattttatctggtcgatgctttcagcgataaaaactttggcggcaatgccgcggctgtctgcccgctcagcgagtggttagccgacgatgtgctcctgaaaatggcccagcagcataatcaatccgaaacggctttctttgtccgtaccgacgagggctatgagctgcgctggtttaccacactcgctgagatcaatctctgcggccacgcgaccctcgccgctgcgcacgttattttcgaatatctcgaccatccttcggcgacgattctctttagcacccgttttgttggtgagctgcgggtcacccgtaatggcgactggctgacgctcgatttcccggcgtggtcgacctccccggtgcaaaacccgccggcggatctgctgaccgggttgggactcgaggccgccgttgaagttcgggaagggcgcgattatctggtggtgctggcggatcgccagcaggttgaagcggtgcgaacggatatggcgcggctgcgaacgcttggcaaaatgatctgcgtcagcgcgccggatgaagagtatgactttgtcagccgcttcttctgcccgggagaaggggtgccggaagatccggtcaccggctccgcccatagcatgctgatcccctggtggggcgaaaagctggggaaaaccaccatgatggcgcgccaggtctccgctcgcggcggcgacctgcgctgccagtggcagggcgaccgtgtgctgattagcggccaggccaccacctatatgcgcggaacggtttacctgcgttaatcatcgcccccgcgtcgccccggggagcggtaatctacttccgctccccgggtgcgacatagcatcagcccagcgatgcgccgccacacatcaccagctcctgtccggtcatcgccgatgcgccctcgctcagcaaccagctcaccagagagaccacttcctgcggagtaatgagtcgcccaagcggcggaagccgcggcggggaactttctctgcctggctgatgaagcatcggcgtatcggttgccccgggagccacgacgttgaccgtcaccccggcaggcgccagctctgccgcccagctcctggcgagagcgaccagcgcggctttggtggccgcatactgcgagcgaccagcggcgcctcgtgacgtacggcttcccagcagaacgatcctcccgcctggccccatggtcggggcgaagtgattgaccaatgtctgagcagcatcgacatgtaaacgccacaacgactcgctgcgctgagggtccagattacccagggtggcggccgccattgaacccgcggcgtgaatgatggcctgagggggctcaatctgctccagcgccgccagcagcgcgctgcgttggctgacgtcgaccatcagatggcgaaagttcggctgtgagaagggcggcagcgaacggctcatgccgatcacctgccagctgtccgccagcaactgcctcaccactgcggcgccgatcccggagctggccccggttaccattgcccgcttcatcgcgcctccagcatctcagcggggattttgaatactgcctttctgaccggtgctggcgtcgaaaccgcacacagcgcctggtgcggttcgccggggtaaaagaccgcgaagtcgccgggacgcagcagaatagagacactctccggggccggctgacatatatagaggtcgggcttaagctcatgatcttccgggcgcatcgcgggagccatgcccgcctggatgcgctcctcgccggccaggatgacctgaatatccgcccactggcgatgatattccgtatgccgctcggccgcaggctgggtttgcaccacgctgagggtgcagaaccacggcgcatcgtcgggctggaagcggccattctctctggcactgagggcggccagcgaacaggcctcgctgctcaatagctgctttaacgccggcggcagaccagcctgctgcagcgcctgaagattaccgataatcatgcgctttctccttttacccactgtggcgagacacgaacatacttgatcgcctggcgataccaggtgtaggcgatatgcaaattaccgtctgctccctgtttgatgctggggtaggagaactcccggttcagcttctgctccgaattattggtcatgcagtagccgtcaccctcatcgagattgcgcagccacggccagctttcaccaccatcggctgaaatagcgacggtcatcggcgcgcgtggtgcgccccagaaggcgcttttcccggtcgcttccggctccctacggccatcgtcgtcagcaatttcatcatacagcgaggcgcggcgttccgtggcgccggcggcgctcatattattgaacaccagcgccagttcaccattgtccaggggggtcgcctgaatggacgagttgttgttcggaagcgtcgtcggtaccggcgcagaccagctctctccctggtcgctggactggctgaaccagatatgatccgcccagcggctgcggaagaaggctgccagtctgccgtccggaagcggagtgatactcatatggacacaacccaggctctccgggaccgccacgtcacgccagctttttccgcagtctgaagagatcttcaccgcgctgacgtcattgttacccacccatttctcgccgggttcggtacggcagtaaaagaccggcagcagccagttgccgtcagacataacgcttattggctggcgaataaaggtacccggctgatccagcagcgtatcgatggccccccagcttcgtccgccatcgtgggagaggcggtagcgcacaatggcggtatcctggtttccggcaaattgcgctgtccacaacagccacagcacgttatcgggcgcctgaaacagcaccgggttttgttctgagcggtctgggtcatcacatagcttgaccgcctcactccagcggtcactgccgggggctaaccgcgatccccagatagaaatatcggcttttccctcctgggagccgccaaaccagacgcacatcaggctgccgtcatccagcggcagcagattggcggcatggttctgcgggcaggcgcagggaagcattgcccatgcgatgtgttcatcttgctggtgttggcgaatgacgccgtcaaaaggcggaattacggtcatgttttatactccacgttgctcaactggggcgggggatggttgtgatttatttgggatcaggcggtcaatcaccatgatgatggccggggtcgccagggcgacatacatgttattgatgccgaacgggtcgccgagtaaataccagacggacgtcaccacacaggcgccgatcaggccggcattcgcgccccgagtgcttctgaagaagggggcatagaaggcgatgaccgccaccacggtaatggagaggcgaatggcgcgggtaaagaaggagagtttcagcacctccggtaccagcagcacaaagatcagcggcaggaagccgataattagcgacgcccagcgtgtggctctgaattcctggtccggcgttgggttgcgccatggtacgtaaaaatccttcaccaccagcgaggcaatggccagggctacggtacttacgctgacgaaaatcgatgccacaagtgacgttgtcaccagacctgccagccacgggttcatgtcctgcagaaagaccgggagggcatacaggctgttgatctcgggatgcaggtatttcgccgcgacgccgataatggcgatggcaaaggcgataggcaggcagaaaaagaaggcgatccaggtggagcgtttcgctgaccgaacgtctttggttgagctaatggcctgaatgacaaactgggtgcaaaaaatggagccgatagtgccgatgagccaggcgaagatcgtgccagcaccaatgttgccatcccatgtccagtaataatccggcatcttctccatcatcggcgagaagccgccggttttggacagggcaaaacccagaatgatcagcagaccggcgtatttcaacgcgctgtgtaacatggtgacccaggcgacgcccttcatgccgccgaacgcgaaataaaaggtactcacaatggcggtaataaaggcggctaccggtaaattcacttttaatacggtggagatggctgcggcaccgctgacgtaattgcccacgttaaccagcagcagcgcataaatcataatcagggagataatatttttggtactgttgccatatttttcagcgatggcgccggaaatggtgatttttccggtgttatagatgcgtttcaccaggattaaaccgaacagcggaaagccgatggctgcccccagcacggaccacgaggcggcaattccgctctcaaaggcggcctgggcagtaccgatggtcgatttggcgccaatatattctgacatcagtaatataccgacaataaaggccggcatggcgcgcgagccttccataaaatccccggaatttttactacgaatacggaatgtcagccaggtggtaaacagaatataggcaataacaatgccgacaataataaaggtatcttcagcggtaaaatgattcatcttagcctctctctgggcgtacgaatcctgggcacggcggtacccggtctgttttattaaaaaagcgcagcaagtattacgctaaataacgagcgatgatgtcgcgtatctgctgcagctggtggtcactaaactgcaccgcgtagcggctgtcgcccacctcgtgacccattagctgcagggctttcttcaccgccgcaggcgagaacgccactttatacagatcggtgcgcaggcccgttacctgctcctgggcctggcgcgatccggcgatatccccggcgtgaaagcgcgaccagatggcgttaatttcagcgggggcgacgttggcaagccccgagatgcaggccgagcagccgtcgacaaatccctgatggataagcgagtccggcccgttcagaacgtcgaaaccgtcgatatcgcgcaccgcgtcgagaaagcctttcaggctgtcgtagctgccggcgctatccttaatgccgacgatattctcgtggcgggccagctggcgcgcggtctccggggcaatagtgttcccggtgcgggcgggaatgttgtaaagaaagagcgggacgctcagcgcgtcggcgatcgccgtatagtggttaatcagctcttcctgcttcaagggcacgaaccacggggtaatggccgataccgcgtcaactccgaggcgggcgatctgctggcccagccggcgcgtctcccgggtggaaacctccccaatatgggccaccaccggcgcgcgaccggccgcctcttccacgcaggttctggcgacggcgatcttctcttcctcattgaggacaaaaaactcgccgttggtgccgccgcagaaaataccgttgcctgcggcgagctggcgctgcacctgctggcgtagcgccggcaggttaagcgctccctcggcggtaaagggagtgacaatggcggtgagtacgccgctaatagctttcctcatttaactttctcctgttaggcatgttctggatacagcgtttggtagatggccgcgatctcttcgcggctgacgctgcatggggcattgttcatcaggcgtttgacgttttgcgccgctgcgctgagggcggaaatactctcctgaggcacgcctagcgcggccaggttgtccggcagcggcagtcgtttgaccagcgccgccagccatgcgaccagcgcatgggatttctcttccgcgctgagcgtgcgatctgcatcggggatcaggtcccagacttgagcgaacttcgccaccgcgtgagggcggaccacccgcatgcagggcgccagcagaatggcgttggccaccccgtgcggcaggtgccaggtaccgccaagcggataggagagcgcatgcaccaggtgagtgccggaatagttgattgctgcgccgccgtaccacgaggcccagagcatctccagcttcgccgtcagatcctgcggctgatttaccgaacgctcgatatggcgtaccagcttgtgtaaaccgattaacgcggcgttatcgctcaccgggttggcgacggtggaggtaaagcactccagcagatgacacagagcatcgattccggtcgacgccgcgatgctgggcggcatgctggtggtcagctccggcagcagggcgacatagtccggaagcagcaccggggagatgatccccaccttcgtctgctgctcggggatcgccagaatggcgttcggcgtcgcttcggatccggtgcccgcggtggccgggattaacaatgagcaaattcgtcgttgcggctgctcgcctgccagcagggacgtctgcgagggcgcctcagggtgcagaagtactgacagcagttttgctacatccagtacgctccccccgccgataccaacgaccatctgcggctggctggcgcccagctggctgacgatctgcgtaacatcgtgatggttgggctccgctggcacgctgtcaatgacctcaacttcacgcccttcagccgccagcaggcgatgaatcgcctgggttgcctccagcgccccgacgttcttgtcggtcaccagcaggattgaggatttaccggccagcagcgggagcagggccgatgaggcgccagccccgctgatgattgtgctgtgtatcgtcgccacgcgtttctccttggtagtaattgattgaattcaatcattcataaatcttgccactcgtctgatggggaaaagttataatttatacggcaacttaataacttgagcttgctcatatttaatcaaatatgattgaatataatcaatttaagattttatcgactacaaggcaggagaatgaacgaccgcaataacagagtgctggtgctggcggatgactttaccggggccaatgacgccggggtcagcctggcggaggcgggtatgtcggtggaagtggccttcaccgccggacagccatcaaccgcccgggcattaattctcaacagcgacagccgggcgatgaccgccgcggcggcggcggacaaggtcgccgctctgctgcgcggcgcggcgacattcgtcccgcactggcaggtaaagaagattgactccacgctgcgcggtaaccccggcggcgaactggaggcaatgatggcggcgcaaggctgccggatggcggtggtggccccggcttatccggcagccgggcggcatacccgggacgggcgctgctatgtgcatggtgtgcccctcgatcagaccgaatttgccagcgatccgaaaacgccggtgagccgggcggagattagcgaaattatcgccatgcagagccgtcttccctgtctgaccctgaacgctggccagcttccggcggcattagcgacggcgggcgaggagaagcgagtgttgattgtcgacgcctgggaagacagccatctggaccaggtgatcgacgccgttgcgccccatgcgcgggagaccctgctggtcggctcggcgggtctctgcgaggcgctggctcgccgcctgcgccgcagcgagcagggcccgctgatggcggtggtcggttcgatgagcgagatggcgcagcgtcaggttgctgcgctgcaggtccattcccgagtacgggtgattgaaattgatgtcgaacagacctttagcggatcgccgaaggaggaagcttcacggatcgccggggcgctgcgcgagggccagcactgcgtggtgaccacccgcccgaatcacgccgcccggcacgggattgaagcccggtgccgtgaacgcggtctcagccgcgccgcctacggggagcacatctgcgcctggcttgccgacgtcacggcgcaggcggtggcgcagtcttcccctggcgcgctgtatctttccggcggcgatgtggccatcgccgtcgcacacgcgctcggcgccacagggtttcagatccgcggccgggtggcggagtgcgttccatacgggcattttctcggcggccgctggtcgcggccggtgatgaccaaagccggaggattcggcaccgacaccacgctattacatgttgtgaattttattgaggagaaactgagtgtctaagatgattgcagtgacaatgggcgacccggcagggattggtccggagattattatcaaatccctcgccgagggggcgctgagcggcgcgccggtggtggtggtgggctgcgcgcagacgctgcggcggatcctggcgctaaatatcacgccgcgggcggagctgcgcattattgaccatcccgccgaggcgagtttctccccagcgaccatcaacgtcattgatgaaccactcagcgacccgcaggggctgcgccctggcgaagtccaggcccaggcaggggatctcgcgtttcgctgcatcaggcgggcgaccgcgctggcgctggagggcgcggtcgcggccatcgctaccgcgccgctgaataaagaggcgctgcatctcgccgggcacgcttatcccggccataccgaactgctggcccacctgacgcagactaccgattacgccatggtgctctataccgagaagcttaaggttatccatatcactacccatatttccttgcgccagttcctcgataccctcaaccagccgcggattgagacggtgattggcgtggcggatcgctttctgcgccgcgtcggctatccacgtccgcgcatcgcggtcgccggcgttaacccgcacgccggggagaacggcctgtttggcgatgaagagatccgtatcgtcgccccggcggtcgccgccatgcgggcgaagggagtggaggtgaccggcccctgtccgccggacacggtgtttatgcagtgtcacgaaggcatgtacgacatggtggtggcgatgtatcacgaccaggggcatattccgctgaagctgctgggattctatgacggggtgaatattaccgccgggctgccgtttatccgtacctccgcggatcatggcactgcgtttgatattgcctggacaggtaaagcgaagtctgagagcatggcaacctccattgagctcgccatgcacatcgcgcaggaataacatgaagggatataaccggttagagcagattatggacttcctgaaaagccataatctggtgacagtcgaccagctggtggcggcgaccaacgcctcgccggccaccattcgccgcgacctgatcaaactcgatcaagaaggggtgatcagccgaacgcacggcggggtgacgctgaaccggtttattccttcccagccgacgacgctggagaaagcccagcgcagtccgcttgagaagcaggctatcgccagtgcggcggcagcgctggtgaaagccggcgacgccattgtgcttgacgcaggcaccaccatgattgagctggcgcggcagatcacccatctgccgctgcgggtgatcaccagcgatttacatatcgcgctgttcctatcggaatttaagcagatcgaagtgacgattatcggcgggcgcatcgatgacagcagccagtcgtgcatcggcgatcacggccgccgcctgctgcagaccatctggcccgatctcgccttcgtcagctgcaacggctgggaccttgagaaggggatcaccgccccgacggaggaaaaggccgccctgaagcgcgatctgatggccaatgcccggcggcgtatcctgctggcggacagctccaaatacggcgcctggtcactgttcaacatcgctccgctggcgtcgttgaccgatatcgtgaccgacgcccacctgccggataaaacccgcgaggcgctggagaccctttccccgcagctgatcattgccgactgactcgcaggctgccgtcagggcagacgggcgatattggccttgatcaccgcgatcgactggctgaacttcgcctgctcttcgccggccagctgcagttcaatgatctgcttcacgccaccctgggccagcaccgccggcaccccagccgccgcgccgctgaccccgtactcgccgtcaagaatgcaggagaccgccagcgcgcggtggctgccggtgaagatattgcggcagatctcggcgatggtccctgccacgccatattcggtgcagcctttacccgcgtagatctcaaatcccagcttgcgcactttgtcagccatcgcctcgcgatcgagcggcaggccggtgcgctgctggtagaggtcggcgattggcgtgccatataccgaggagtgcgaccacaccggaaactgggtatcgccatgctcgccgaggataaaggcgtcgatgctctgggcgccaatctccagttcctgcgccagcaggcgacgcaggcgggtggtatccagccagacgccggtgcccagcacctggctgcgcggcaggccggaaagctgccatacctgccaggtgatgatgtcgcaggggttggtggccaccagaaagatgccgttaaatccgttggccatcatcgtcggcacaatgctcttcacaatcttcgcggtggaggtcagttcatccagccggctctggccggggcgcagcgcgccgccggagacggtgatcaccgcgatatcgacatcggcgcagtcgctggcctcgcgggtggagatggtcatcatccccggcaggtaggccgcggcgtcgctcaggtcctgagcgtgggcctcagcgcgctgttggttaaggtcgacgaggatcagctcctcgcaaatgctctggttgagcagggcgtaggccgccgacgcgccgacattgccggcgccaataatcatcactttacgggctttggtgtgcatattcagatctcaagtacgaacggcaggggataaaattactgtgtttcagttggttagcgcaataggcgggcggcaatataagttaatgctatgtcgggaaaagccgccggccgcgctacagtggggtaaaaaggagctcacctatgtacaccatcaccgacatcgcccctaccgacgccgaatttatcgccctgattgccgccctcgacgcctggcaggagaccctctacccggcggagagcaaccacctgctggaccttagccagctgccgccgcagacggtcatcgccctggcgatccgcagcccgcagggcgaggccgttggctgcggggctattgttctcagtgaggaaggctttggcgagatgaagcgggtctatatcgatccccagcaccgcggccagcagctgggagaaaagctgctggcggcgctggaagcgaaagcgcgtcagcgcgactgccataccctgcgcctggagaccggtatccatcagcatgcggccatcgccctctacacgcgcaacggctaccagacccgctgcgcgtttgcgccgtatcaacccgatccgctcagcgtgtttatggagaaaccactgtttgccgatcttcgttcagcagcgctataaacgcctccagctggcgggttttggcgccccggcgccacaccagccaggtggtgagccagcgccactcttcggccagcggccaggcggaaacctgctgatggccgggcatactctccagcatgctgcgcgggatcaacgccaggccggcgccggcgatgacgcaggccagcatcccgtggtaagactccatctcgtggatcctgcccggggtcgctctgtcggcatgaaaccagctctcaaaatgccggcgataggaacagttggcgcgaaaggcgtagacgttggccccgttcacttcgctggcgcgggtgatgggtgcgtggccgtagggggcgacgatcatcatctcttcagggaacaccggcagcccctccaggcccggatgcaccagcgggccgtcgacaaacgcggcgctcagggcgccctccagtacgccgtcgatcatcgtcccggaagggccggttgagagcgccagatgaattttcgggtagcgctgattaaagtgggccagagtgctggggatccgtaccgccgcggtgctctccagtgaaccaagagaaaacagcccctggggttcgtcgcccgccaccaccattcgcgcctcgtccaccagggcgaggatctgctggctatagcgcaaaaagctgtgtcccgcaggcgacaggcgcaggcgctggttctcgcggataaacagctcaacgccgaggtcggcctccagctggcggatgcgggtggtgaggttggacggcacgcgatgcactttctgcgccgcctgggtaatgctgccggtgctggcgacagcgttaaacatctctagctgagtcaggtccatgatattcttcttttgtgaatgcgttgcttaatattattcattttcaatgaatggaaaggtaagccagaatacggacacttcgcaagcaacgagagagaataatgatgaatttatctgcaacgcacgccgtctccgtcaatccgactaccggtgaggtggtctcctcgctgccgtgggccagcgaacgcgaggtcgacgcggcgatcgcgctcgccgcggcgggctatcgccagtggcgtcagacgccgcttgccgaccgcgccgacgccctgcgccgcatcggggccgcgctgcgcgcccgcggtgaagaggtggcccagatgatcacccttgagatgggcaagccgatcgctcaggcgcgtggcgaggtggcgaaatcggccaacctctgcgactggtacgctgaacacggcccggcgatgctggcgacggaagctaccctggtggaaaataaccaggctgtaattgagtatcgtccactgggcgccatactggcggtgatgccgtggaacttcccggtctggcaggtgatgcgcggcgcggtgccgatcctgctggccggcaacagctatctgctgaagcatgccccgaacgtgatgggcagcgcccgtctgctgggcgaaatttttgccgccgccggcctgccggatggtgtatttggttgggtgaacgccaccaatgacggcgtttcgcagattatcaatgacgaccgcatcgcggcggtgaccgtcaccggcagcgtccgcgccgggaaggcgattggcgcccaggcgggcgcggcgctgaagaaatgcgtgcttgagctggggggatccgatccctttatcgtgctcaacgatgccgatctcgatgaagcggtgaaagccgccgtcaccggccgctatcagaacagcggccaggtgtgtgcggcgtcgaaacgctttattctcgaagccggcattgccgaggccttcacccgcaaatttgtcgacgccgtggcagcgctgaagatgggcgacccgcgcgacgagcaaaactacgtcggaccgatggcgcggttcgatttacgcgatgaactgcaccaacaggtaacggcgacccttgatgaaggagcgactctgctgctgggcgcggaaaaaatcgaaggggcgggcaactactatgcgccaacggtgctgggcaacgtcaccgccgggatgaccggctttcgtcaggagctgtttggtccggtagcaaccctgaccaccgctcgcgacgctgaccatgcactggccctcgccaacgacagcgagtttggcctgtccgccacggtctataccaccgacgaggcgcaggcccagcgctttgcccgcgagctggagtgcggcggcgtcttcctcaatggctactgcgccagcgacgcccgcgtggccttcggcggcgtaaagaagagcggttttggccgggagctgtcgcattttggcctgcacgagttctgtaatgtgcagaccgtctggaaagaccgtcgctaatcaacgttagcccctgacgaccgtcgtccacgtctgctatactcgcccaccgaattttgatggtgggcaaggagccgcgtgtggcgacggttatcaataatgcaatgctggaagccattctggcagaaatcaggccgctgattggccgcggaaaagtggcggattatattccggcgctggccagcgtcagcggcgacaagcttggtatcgcgatcagtacggtggacggtcagcactttgccgctggcgatgcccatgaacgtttttccatccagtcaatctccaaggtattgagcctggtggttgccatgaaccactatcaggaggaggagatctggcagcgggtggggaaagatccttccggccagccctttaactcgcttctgcagctggagatcgagcagggcaaaccgcgcaacccgtttatcaacgccggggcactggtggtctgcgacatgctgcagagccggctcagcgccccgcgtcagcggatgctggagattgtccgccgtctgagcggcgtggccgatatcgcctacgatccggtggtggctcgctcagagtttgagcattcggcgcgcaacgccgccatcggctggctgatgaaatcctttggtaacttccataacgacgtcgccaccgtgctgcagaactatttccactactgttcgctggagatgagctgcgttgagctggcgcgaacctttctgtttctcgccgaccgcggcattgccccgcatctcgacgcgccggttattgcgcccatccagtcccgccaggttaatgccctgatgatgaccagcggcatgtaccagaacgccggtgaattcgcctggcgcgttggcctgccggcgaaatcgggcgtcggcggcgggatcgtggcgattgtcccgcaggagatggcgatcgccgtgtggagcccggagcttgacgacgccgggaactcgctggccggcgtggcgatactggaaaaactgactcagcggatggggaggtcggtgttctgatggtcgatcaggatcgcttgtttgcgcgcctggcgcgctcgacgtttcgctcacgcttccgtctgggggggaaagagcggcaatactgtctcgataagggaccggaggttatcgatcggcatgccgcagactttattcgccagcggctggcgcccgctgcgccgatcaatgatggcaagcagacgccgatgcgcggtcacccggtgtttatcgcccagcacgcgaccgctacctgctgtcgcggctgcctggaaaaatggcatgccattccccacggccgcgcgctgagcgagccggagcaggactatatcgtgcaggtcatccaccgctggctggtgctacaaatgaatgcgccgtctgtgcgctaatttgcatttgatcggcgccggagtatgcctgataaatattctcatgttatgataatccgctaactaactattaacataataatttcctgaaacaattagacggataattactgaatgtcttcactgtcgattcggtcatttacgctgtttcgtgaagaacaacccgtgcgcgatgcattggtcttatttacgttaacgctactgctgcattttcttggcgctatgctgcgtctggtgcaggagctctctttcttctggccgctcaatgcagtgatggccgggatttttgcacgctatgtatggcttaaccgcagctatttttatgccgtctgttttgcggcaatgctggtctatgacggattaacctcgcgctggggtatgggctttgcctcattgctgattaacttttccaatattgtctttattgtgacgctggcgcagctggtgctgtgggataaacgtcgcgccgactccatgccgggcccgataaacgcgcttaatttattctgtttctgcctgttagccgccttactgtgcgcagcggtcggcgcgctggggtcggtggatgttgaacgcgccaccttcgttccccagctggcggactggtttagcgaacagttctcaacggcggtattaatcctgccctttattctgaccctgacgctgccttcggcattaagcggttttcgctttcgccagctgctgccggtgctggcgctggtcctgtcaattgcgcttggcttggcggtaggcggcgcgggcagcattaccttcccgttaccggctttgatctggtgcgctgtacgctatccgctgccgctgacctgtctgctgacttttctcactggcatcggcgaaatactgctggtcgctaattcgttaattcacttttcgccagatgcgcgaatgcagccgtggcagctgttctccacccgcctcggaattgccgccatgctgattagcccggtgattgtcgcatccagtgtcgaagcgattaacacgctggtgaagcagctggccctgcgcgccgattttgactttcagacccgcgtctattcccgttccggactgagcgaagcgttgaagcgtcagacgctgccggcggataagctgctgacggtgatggtgctggatatcgatggcttcaaacgggtgaatgatgctctgggccatgaaggcggcgattgcgtgctgacccagtttgcccagcaggttcgacagctggtgggtgagcaggggatggtggcccgtatcggcggagaagagtttgcggtggccgccgtcgtcgacagcgcccagcagggctatttgctggcggaaaagatccgtcacggggtggagtcgcagcctttcggcctgggccagaacccgatccacctgaccatcagtctgggactggagacgcgcgaggtaggccacgcccgcatcaccgagctgtttaaccagctgctgttggcggcggacgatgagatggtgaaagccaaacagagcggtcgtaaccaaatttgtatgccgacgctgaccgaaagcgcgccataagaaaatcctatcgggatcctacttgtgctaatttttggttaaaaacatagtgatgtggtcgataacagggagcttttatgaccacatccttttcactgcgcacgctctcgcgtgacgatattctccatcacctcccggcattaagcgagatcctggcaagctgcgtcaacggcggcgcctcggtgagctttatgctgcctttcgcgccgcaaacggcgataacgttctggcaacgcactgccgacagcgtggcggccggggagcgcattgtgctggccgccttcgacgcggaggaacgtcccgttggcaccgtgcaacttatcaccagtcaaccggaaaaccagccccatcgagcggatgtcgccaaattattggttcaccaaaatgtccgccgccaggggatcgcccaggcattgatgagcgagctggagcgcattgcccggcgggaaaggaagacggtgctggtgctggacacggcgaccggcagcggggcggaacagttctatgcccgctgcggctgggaaaaagtgggggaaattccgcgctatgcgctgatgcccgacggcgaaatgactgccacctcactattctataagtttctgccctgacggccgctattgcagattgctttgatcaaaacagggtttcactggtagcaaaacctgataacttattggaccaattactcaggttgtatgactactattagagggaacccattgtgaaaactttaaaccgtcgtgatttccccggcgcgcagtaccctgaccgtatcatccagtttggggaaggtaacttcctgcgcgcattcgttgactggcagatcgacctgctcaacgagcataccgacctgaatgcgggcatcgtggtcgtgcggcctatcgccacagattttccgccttcgctgaacacccaggatggcctgtacacgactattattcgcggcctgaacgagcagggcgaagcggtcagcgatgcgcgtcttatccgctcggtcaaccgggagatcagcgcttacgcagacttcgacgcttttttacgcctggcgcataacccggagatgcggtttgtcttctccaacaccaccgaggcgggcatcagctaccatgccggggatcggtttgacgacgcgccgccggtcagttatccggcgaaactgacccgtctgttgtttgagcgttaccagcatttcgccggtgcggccgacaagggatgggtgattattccctgcgagctgatcgattataacggcgaggcgctgcaggcgctggtgctgcgctatgctagcgaatgggaactgccgcaggcatttatcacctggctgacctcagcgaataccttctgttcgacgctggtggatcgcattgtgaccggctatccgcgtgatgaagtggcggctctcgaggcgcagaccggctataaagatgctttccttgataccgctgagcatttctacctgttcgttatccagggacctgcctcgctggaggccgagctgcgtctcgataaactgccgctgaatgtgcgcattgtggacgatattaagccgtataaagagcgcaaagtggcgatcctcaacggggcgcacaccgcgctggtgccggtggccttccaggccgggatcgacaccgtgggtgaggcgatgaacgacgcggagatttgcgcgtttgtcgaaaaggcgatttatgacgagattattccggtgctggatctgccgcgcgatgagctggtgtcattcgccagcgccgtgacagggcgcttccgtaatccctatattaaacatcagctgctctcgattgcgctcaacggcatgaccaagtaccgcacccgtattctgccgcagctgctggcggggcagaaagcgcatggcgccctgccgccgcgtctgacctttgccctggcggcgctgatcgccttttaccggggagagcgggatggtgagagctatccagtacaggatgacgccgactggatatcgcgctatcaaacgctgtgggcccgccatcgcgatggccagatgagcactcgcgagctggtcaccgccgtgctcagcgtggcggatcactggcagcaggatctgagccagatcccggggctggtggagctggtgactgccgaccttgacgctatcctgacctgcggtatgcgcaacgccgtcaaacctctttgctgatagtccatctaaacacccggctgcggccgggttgtgcaggatttttattagttacaacatactattatactaacctgtaacagccggtcagtggctcctctgcatacggctttttagtgccaaatcgttccgaacagcaggtgaattatggccgaagagcttgaacaaatatctgcgcaggaaaataatgacctcaactcatatctcctgccaatattcgcaggctaatgcattcatctgtaaggaaactctcatggtcatcgatatccgggaagtacggccccacgacaaagccgaatggcttcagctttggcaaggctacactcgtttttacggtagcccgcagccggaagaggtgaccgaatgcacctggcagcggatgctggatgtaaactcgtctgtattgggtagagtcgcggtggtggatgatgcggtggtcggcttcgctatctgtgttcttcatgagggaacctgggttaccacgccgatctgctatctggaggatctgtttgtcgatcccgccttccgtggacagggtattgccagaaccatgattaagtcgctgcaaagcgaaggggcggacaaaggctggtcgcggctgtactggcatacgcgccgtgataatcccgcccgtcatctgtatgatgagtttaccccggctgacgattacgtacgctacaggatcacgcttgagtcctgaagcggtaagaggttgttaagcttttcccgctataacaggggaaacaggctcaggagaagcaacgatggaaaaacgtcttgaaacagtggtcaatgtgattatgtttctttcgctattggcaacggcctgggatctctcgctggtgcatcatctcgcgtggtagtaaattatatcatctgaaacgcggcgcctcttgcggcgccgcctgtctcattcatccgccatcttccctgcgtaaaactccagtcctccagttggttaaactggataaccaccatcacgtcctgcgggctgaccgccatctcatcgtctaaccgcgcgcagagccgacgatagagtccttgtttctgcgcccagctgcgcggttttccagcgaaaatatgaaacaatacgaagtaatagctaaccgagatattttaaaccgggcagggtgcgagggaatataaacaaaagagtagagtcaatattactatcaaggccatcgttttataagtatattgaaaggccagatgatcataagaaatatgtgccggaacaatgaatgatctaataaaggaaggatctaattatgtattataggaatttcatcattacctcaatcgaggcggagcgtattcttgccatgaaatttgatgaagcatttgctggagtaaaaaagaatgttattgatacactgaatcaaatgggaaatggtataacccgtgcttcgtattatacttcctgcttaatggataattatcaggatgtttgttctaagttaaagcaagaggacacaagatttattgcagggctggcgcagttagttaaaagccgtgatatcattttccaaatgattaaaatatatatagaaacctactttcaaaataaaaaagaagaaaaagctcaatatattctcaagaagcttgtcggcgcgggagtttacatatcatcttcaggattaactaatcgtattttaatcatggcagtagcaaccatgatttgccagacttccaggtttaatactgttgtatatgggcgtatcaacagggcaaggtcattagtccttaaagggagtgtaactgctaccgcagtggtattaaacgtgtatggattgattcaggatgccgctaatagcgctgacaatttgaaaatgcataattcattttattacaatgcgttatacgctaaccatctggagatgatgtactttctcatcgaacctgtcatcacaggcgttccttatttaaatccgatgattatttctgatgatgaacttgctgaattacttattaaattaatgaggtgaatggatggatttcttgaaaagatggttaaaagaagaattcattctttttttatggggatggggtattgtattattaatcattatatttagcatgattgcagtctctctttttcctgacattgccattaacttaataggactttttgttttattaatcattgggtttcacgttgtcgtttggtttaaagttaaaaactgatatgaaagaggaggggtaatgtcaaatccagcatatttatggttaactgatgagaatgattcgcctattataggttcttgcctgatgcccacacgcacgggttccatcgaattgcgcgcagtgaatcatcatgtttggttacctaccgataataatacaggaaagctgacgggaacccgtcttcatacaccggttaaaattcaaaaagagtttgacagaacaacacctttgctatttagggctctttgtgaaggtcgaacattaagatcggcaacgctaaaaatgtacagaataaatgaggcgggactggaagttgaatattttaacatagcgatggcgaatattaagattacggcaatcacaccaaatttacatccggccggaatgacaagtactcaccttgaagacattgatttccgttatgagacgatcacctggatatacacagaagggaacatcatgtatcgtgattcatggaacgatcgctgttgtgcatggtagcaaatgatatagtgctgaaacgcggcgcctcttgcggcgccgcctgtctcattcatccgccatcttccctgcgctaaaactccagtcctccagttggttaaactggataaccaccatcacgtcctgcgggctgaccgccatctcatcgtctaaccgcgcgcagagccgacgatagagtccctgtttctgcgcccggctgcgcggttttccggcgaaaatatgaaacagcacgaagcgggcgctgcgtccttcgctgaggtagtgcgggtcgtaaatgcgctgctcatcggcggcccgttcgataaactgaaatctatctgctgacggaacgtcgaactccgccaccagacactcatgaaagagcgccgacaattgagcaaactccgcgggacgccaggcggtgccaagcgaaattcgggtcaagggcatgacgcctcctgcgcgttcaggcaggtcagggcgctggccgccgccggccaaccggcatagaacgccagatgggtaaacaattcgacaatttcttcccggctcaggccattctgatagccgaacgcgatgtgccacggcagctgttcagttttgccctgcgccgtcagggcggaaagggtgatcaggctgcgttcgcggggcgacagctcgctacgcgcccagatatcgccaaacagcaccgtttcggtcagctcggctagctttggcgcgatagcagccagcgttcggcgatcgacaggaggagtactcatagtgattctctttgcaggttaaaggagtcatcactgtcgcacgctgactaagatattgaatatcgcaacgttcgggattatcaatcctgaaaatcaggatggtatagccgatcctttacacctttcatcactccgcttttctgcccacctatcccaacggtcaggcggcgatctttcgcgccacgataaacagccgtgggaaacgcaggagcaccttcccgttacactgtaacggatagtatgcggccagcaatgcgagatagcgtgtgagaaacgcgcttccggcctgctcgtccaggcctgccagataggggcgtaacccggtgccctgcagccagtcgacaatcgcctgatgagaagcaaggggatgaaaataggtggtgcgccagatatcaacttcgcaactctggcggctgagcagatcgtaccaggcggcgggcgggagtaacggctggcgtccacggtccggcaaccccatctcgctggcaacctgacgcatcagggtatgggaaggttcctgccagttatccggcatctgcactgccagcgttccgttgtccgccagctggtttaccagatgggggaaaagcgtctcatgatccgtcagccactgcagagaggcgttggcatagatcacatctggcggttgcgcaggccgccagcgggcaatatcggcatcaatgaattcgcagtcgggcaaggcctgcgccgcctggaccagcatggccggggagttatcgataccgacgatcgtcgccaacggccaggcggcgcgtagcaggcgggtgctgtttcccggcccgcagccgaggtcgacggcgtgctcgacctgcagatgggcaatacgcgagagcaggtcggccgcggggcgggtacgttcagcgtcaaattgcagatacaacgaaggattccagtcggccatcgggtgcagttcctgtgtgaggagggagacaggggaaagcatagaacgcgtcaggcggcatgtcagcggttaatgaacctcagcggtcacctttgtgcgtgacagtgtcacaaaatagaacgtggctggattgcgcctgcgctgttggccgaacctgggattgagacatggcagggaacgtctctgcgcccgtggcgggcgcaggagcctattcggcgtttttgagcgcctcggcgcggctggcggtggcgtagacaaaatccagcatcggctcgagatcggtgtcatagccagcctgaataatttttcctcgcagccattcgatttcactggtgatatcgggaggaaaaatgttgttatcctgcgcccggcgcagccatttcagcagaaagttattctttcccctgataccacccgcttttttcgattttccgtgcatcttcagcgcgaccaggacgcagtaatagaaatgaacgcgctgattaaaactttggtgcatgtctgtgtttcccgccagaatcaggaattcaccgtgtgggtcagtgattcggattggactacggtaccgggctggatcgttgcgcgaactctgttgtctaccagtaccgtccatgcatctgttgccagacgctgacgggatgttggcacggaagccgaatcgtcgtcaattgccgattcattttttgccggcgtcatcggaccgcggcagcccgcgagccgggccacactactctctggcgacaagccgctgttgccgatgtacgcggaaaatcagcaggaatgcgagcgccaccacgatcgccgccagcagatacagcgtggcgagatcgtagaacccggcgacccagccggccagcggcccggtcaggcccagcgccagatcaagaaacgccgagtaggtgccgagggcggttccctgattttgctcttccacctgctttaccgcctcaacccctaaggccggaaagaccagcgagaaacccgaaccggtgagaaaggcgccgacgccggccatccatgctgatggcgccagccagataagcagcaggccgagactttcgatgatgaagcaggccagggagaccgggactccgccaaagcgggtaatggtatttcccagcaccaggcgaacgcagataaagccgacgctgaacagcgaaagggtaaacgcggcgccctgccagctgtgcgcggcgaagtagagggtgataaaggtggcgataacgccgaaaccgacggtgccaaaggccagccccaggccgtaaggccagatttttcgcaccaccgcgtgaaagggcgctctggcgccggcgttcaccttgacgtcctggcgggtacgagcgaacagcagaccgatggccgcgaccagcactaccaccgtagcaaagccgctgatgccaaaatagtgattgagggtaactcccagcggcgccccgaccgccatcgccacataggtcgccacgccgttccaggagataacccgtgacgtgtggatcgcgccgacggttttgatcccccacagggtggcgccggtggcggtaaagctctcgccgacgccgagaaacacccggcccgccagcagcgcggcaatggccagcatcggcgttgcctgcaggactaccgccagtagcgtgaaggcgccactgagcaggcagcagacgatcccaaggctgaccacttttttcggcccccagatatcggtatagcgcccggcgtgcggccggcttatcagcgtcgatatgtactgcagactgatcacaattccggccacaaaggtgctgtagcccagctgatagtgaatatagcccggcagtacggccagcggcagaccaatggagagatagcagatacaggtaaaaacaacgatcgaaataatgcgcaaattgagttgtgtagtgctgacggaagtgctcatagggataagaggttaatacaacgggatgtgtagcatagcgcgccgtgagggcgctggcgaggcgcgacagcgttttatcggtaaccgacgggaacgatatttgtacgaatgtaaataactgcttttacagcgcttaacgcccgcctcgctcagcgtcagctcgccgccatacccgacgaatcacacaccatgccccaggcgcggttttgcaataccgtgcggtagccgtcccggtcgacgaaagtgacgccattgacctcccagtaagggttaaacgccgtaacgcgcagaaatccggcggcgtccatggctgcgcactgtgcctcccatgccgcctgctgcggatagtacagcaccagcagatcttcatcgcctgccgagggggtgacgggatggtggcggcagtgggtgaattccagatgccagcccgcttcgggcgcgccgagcattatcccgctgaatccttcatgatcggtaaagctgccgagcggctcgagtcccagcccggcgcaatacatgctggcggtggtgtccagttcgctgaccggcctggcaatgcgcatatgacagaacgacataatgactcccgtgagcataagttgagttgatactgtaccggtaaatcggcccggcgtgtgttaagccgtgcccaggcgccaccttctctctgtaaataccatagcggattaacatccgccttgcgccaacaatacctcttcatcataataaaaaaagaatcattcaatattattattcttaaattgagaatcactgtggggtggtggatgaataaccaatcgcgccaggccttatggctggcactggctggatcgatagtactgatgatcggcatgggctacgggcgctttgccttcaccggcgtgctgccgcttatgcttaatgaaggtctgttaaccctgcacgagggcaatctcgccgcgtcggccaattacgctggctatctggtcggtgcgttgctgctggcgcgggtgcagcctggggccgccacccgactgagcattatctccgccgggttgaccatcgccagcctggcgctgctggcctgggtgagctcgccgtggaccattattacgctgcgcgccgtcgccggcgcgctgagcgcgataacgctgattgcaggttcgctgtggctgctggaacatatggggcatcatcacggggcgccgttgctgtatgccggggtggggctggggatatttatctcagcggaggggatcgcccttggacatgccctgagcctcaccagccagcagatctggctgctcagcgcattatgcgccggtctgctgctggcgctggcgatccgttggctgctgactccgccggctgcactggtgcgggtttcccatgttgagacctccctgcctgcgtccgggagcgatacccgtcgcgcggcgtggcgactcttgatggtttacggtctggcgggcttcggctatatcatcaccgccacttatctgccgttgtttctgtccggttcgctgcagagcgttgacccggtccatctgtgggcgctgtttggtctggcggccgcgccgtcctgcctcatctggcataagctggtgctaaagtggggataccggcaagcgctgacccgcaacctgctcgtccaggcgcttggcgtgatccttccagcctgcagcgcttcattgctgttttgcgtgctaagcgcgcttttggtgggctttacctttatgggcaccgtaaccattgcgctaccgaaggcgaaaagtctcagccatcaggtgagcttcaatatgattgccgcgatgactgcactgtacggtgtgggacagattgccgggccgcttatcgccggcgcgctgtatcagatcgcggcttcatttaacccggcgctctatgccgcggcgctggcgctgctgattgccgcagggctggtctttaccgaacgccaggcttagccaatcgccacgctttgcagcagcttgcgccactcgctcagggcgggggcgctcaagccgctgcgccagataagctgggtggtcgcctcgcacagcggttcgctaaggcagttttcgggaagcgtcatcagcgacagcacgctctgcggcagcaggcaggcgtagcgcccggacgccacgcaggcaagcatgctgtgataggaattgacctcatgcacctcgacggccgcctgctgttccgccagccagcgttctcccagcgcgcggtagctgcagccgctggcaaatgccgcgaaccgcagcggacccggggtctgcggacggaccagcatcagggtttcataaaacaccggggtgaatgccagttcggcgggacaggcaggttgcccatcggcccctggcggcaggcagaccagcgcggcatcaagggcggcggttaacaccccctcggttaactggcgggtcggttgggtgatgagggtgatatccacctgtgggcactgctgttggaagcgggtaagcagcggcggcagccggctggcggcggtcgcctccatcgcgcccagacgcagactgccgcctggggttgtcggatgcagagcctgctttgcctcttccgccaggctcaggatccgccgggcatagctgagaaactgcacgcctgccggggacaacaccatttttttgttgccgcgaacgaagagctcaacggcaagctcctcttccagctgctgaatgcgggtcgtgatattggactgtgcgcggcccagccgttttgctgcctgggtgacgctctgcgtttctgccacctgaatgaagatctcgagtgtgctgtggttcatatttttcttctcaatacgataataatgttgatcttaccatctttaaaggagatggtaagcctccagcatcgttaatgcatgaggaaaccatgagcaacccgctgctttcgcttcttgatattgattatcccctgattcaggccccgatggcgggcgtctccacccccgcgctggctgccgcggtaagtaatgccggtgcgctgggctcgctggggctgggcgcttcaaccgttgcccaggcggaagcgatgatagtcgccacccgccagctgacggaccgtccgttcaatgtcaatctgttctgccatgcgccgccccggcgcgacgcccggcgggaagccgactgggcaacaacattacgtccccattttgcccgctatggcagtacgccaccggattcgttaagcgagatctaccagacatttatcggtcatgcgccgatgctggagctgcttctcgacctgtcgccggcggtggtgagctttcattttggtcttcctgaaggtgagacgatccagcgtctgcggcggcaggggatcgttaccctggcaacagcgacttcgctccaggaggcgctgctgattgaacagcaggggatcgacgtggtggtcgctcagggctatgaggcgggtgggcaccgggggatctttgctccgcaggcgcctgacgcgcagctgagcaccttcaccctggtgcaacttctgcggcgtcgactaaccatcccggtggtggccgccggaggcatcatggacggagcggggatcgccagcgtgatgcagttgggggcgcagggcgtacagctcggtacggcgtttttactgtgtccggaatcggccgccgacgccggctaccgcgcggcgatccacaacagtcttgacgggcgtacggtgctgacctccgcgatatccgggcgtccggcacgctgtctggcgaatgccttctgtgcgctgggggaaggctatccggcgagcgccgtgccggattatccgctggcgtatgatatcggcaaagcactggccgccgccgcgaaagcccagggtgtccatgagtatggcgcccactgggccgggcagggggtggggttgatccgcgagtgtgacgccgccactctggtccgccagctggcggcagagagcggctggaactaatgactgacggctagcggcggtgggccaggctacgcaccagccgatcgccggccatttgcaccccctggaccatcgccaccaggatcagcactgtgccaaacatgacttcattattaaaccgctgatagccgtagcggatggcgaggtcgccgagtccaccgccgccgatcacaccggccatggaggagaaaccaatcagcatcacgatggttagcgtgatcccggccagcagcgttggcagggcttccggcagcagggatttaaaaatcacgtgccagacgttgccgcccatcgacagaatggcttcaattctcccgtagtccacctcgtcgagcgcgttttccgtcagacgggcaaagaacggaaaggcgccgatggttaccggcacgatggcggcggtgctgcccagcgtggtgccgacgatcaggcgggtaaaggggatcagggcgatcagcagcacgataaacggcagcgacctgccgatgttgatcaccgcgcctaacagcgcgttcagtttcggcatcggcgccagcccgttggcgcgggaaataaataacagcacgccggtgggcaacccgatcagcacggtaaacagggccgccaggcccaccatataaagcgtatccagcgtgccgtcgagtaataacggccacaaatcttcccagctcatgctactccgcataatggcctcccctgaacgccgtggcgggtaagaaattcctgttcagcctgcgggtcgtgcagcagcgactggcgcagccgcgaccatggggtcaccagcaggtcggcgagtttaccgctttcgacaatctcgccctgttccagcagcgccgcgtggtcacagatggttttcaccacctccagctggtgcgtaatcagcacaatggtcagattgaggcgctggttaatatccgccagcagggccagcaccgaggcggtggtctcgggatccagcgcactggtcgcctcatcgcacagcagcacttccggccgggcggccagcgcccgggcgatgccgacgcgctgtttttgcccaccggaaagctgcgacgggaaggcggcggccttttcgctgagatccaccagcgccagcagttcgcgcacccgggcctcgcgagcggccctcggcactccggcaatctccagcggcaccgcgacgttgtcagcgacggtgcgggcatgcagcagattgaagtgctggaaaatcatcccagtgcgcaggcgataatcccgcagcgccgccttgttcaactgggtaatatcctgtccgttcaccagaatgcggcccgaggtgggccgctccagtaaattgagacagcggatgagcgtacttttgccggcgccactgcgcccgagaatgccgtatattgcccctttcggtatctgcaacgcgatatcgttcagcgccggtcggccggttccggcgtaggttttgctcagcccttcgatggttatcatgactgagggaccaccgggatcaccgagccgttataggttttacggataaactccgccacctgcggcgaggtcaggtctttcgccagcgccttaatgcgcgggtcattcgccagggctggggtggtcaccagaatattggcgtacgggttatgctcggcgctttccagccccagggcatccttcgctggcaccaggccggcttccagcgcgtagttgccgttaatcaccgccaggtcgacatcatcgagggagcgcgggatctgcggcgattcaatctccagaatcttcaggtgtttcgggttctcgacaatatccttcggcgtcgccagggtggtggccggatcggtaaatttgggatccagcttaataagcttctgcgcctgcagcaggaacagcgcccggctcaggttggtggtgttattcggcaccgccacggtggcgttttccggcagtgatgagaaatctttatgcttatgcgagtagatccccagcggctcaatatgcaccgtggccgcgacggcaaaggttttacccagcgctttctcctgatccttcaggtaggggacatgctggaagtagttggcatccacatcgccactggccagcagttcattggcgttgaccccgctggtcagctccaccaccttcagatcgaggctgggatcgatttttttgatgtagttgaggatctccgcgtggggaaccgggtccgcggcgacgcgcagcgcggcagcctgggcagacgtccatgccagagaaagagacagtgcgactcctgccagtttaaaagcggcatatttcatggtgtgttcctttttagttatggttaaacgatcaattgctcggcgcgttcgcgaaacacgtcctgatagtagcgttccgccacgtccggatgggaacgcagacggcccttgagataattccagccgacatcgcgcagcagcggattgtgcgggtcgctgtccggccctcgcgcttcacgcgccagctcgggcggcagggtgtaaaccggcaccaccgcgtcaagctgggcgccgaggaagaaggcgatggagaggcgctgctgctgcgccggcggcgacaccacgcgatggacggtagcgcgcaaatacccgttggtcgccagctccagcagttcgccaatattgaccacaaagctgccggccagcggcacggcgtcgatccattctccaggcgcgacctctacctgcagtcctttctgctcgtcctgcagcaggaagctgagaaaccccgaatctttatgggcgccgacgccctggctgctttgggtctcctgctggccggggtagcggatcagtttgatatgctcgttgggtttgtcgccgtagagctgatcgaaagcattctccgggagctgcagggcttcggcaaaggcgcgcagcaggcggatgcccacctgggtcatttgctgttgccagtgaagtaataccggtttaagcgacggcagggcggcaggccacagattcggaccctgcaggcgctgccagcgcggggcgtcgtcgctgagggtcagcgccggacgttcggcgccgatatcaaactgttctcgccagtcaggctggccgcgcgtcagctcagaggccgcgcggttatagccgcgaaaatggggggagtggatcatcgccacctgctgtttttgcgcctcatcgagagcaaaaaagcgctgggactggcgctgaacttcatattgaagcgcgtcgtcgacaccgtggttgatcaaatagaagaagccgatgtcgcgggcggcatgacgcaggtcggccaggaaggccgctttatccgcggggtccgcgtagcgggccagatcgagaatcggcagggtggtcgcgttcattgtgttctccgaaaacggggtaataagttatgggttgattcagtttctgggttcgggcacaacagcagcgcatggtgatttcctctgtccggggctgaacacagcttgcctcaaggccaaataagcaaccaataacgttattttctaatttatgaccgcgcggggttcagtgcttttgcattaaatagatataggcgcgaagcgcgtaatgaagccggttgcgcccgtcggtgagagccagtaaggtaggcgcactttttaatgcggaacggacgtatcgtaatgcacagctcgaaagatcccctgcacggcgtgaccctggaagcgctgctcaatgccctggtggcgcgctatggttgggcggaaatggcccgccaggtcaacattaactgctttaaaagcgatcccagcattaagtccagcctcaaatttctccgccggacgccgtgggcgcgcaaagaggtggaggctatgtatctcgcctcccttgatgatgacgcgccggtggagaaagcggatccctgggcaaactggcagaaaaaataacccttaccacaggacaccatcatgcagagctggagcagtaaagatttcaccgccgaccgcgcgtggggcgcgctggatattgccaatttttccggcaccaccgtgcgtctgcactggaccgaccaaccctatatctggcacatcaatgatggtcaggaggtgtttgccgtgatggatggtcaggtggcgatgcatgtgaaagtcgacggcgaggagcagatcatcatgctaaacgccggcgatatcttctacgccggggtgggatgcgagcatgtcgctcacccgcagggggcggcgcgtattctggtgattgagaaagaagggtcggtctgaccccgtggcgggcggttctttgcccgccgtttcatcgcccgtcagatgcgacataccgcgttgatataaattacctatcctgctttcgatatatttaattcttgtttgccattcccttcaccccagcactatcttttgccgcaggcgcctgaccaggcacaatcgcgggagagatcatggcaaccttgcagtgggaccacgcagtacagtttgtgaatcagccggaagcggcgattgaaatctttgccgggcagcagctgcgggcggtggccggagggcggcatccggggtggggaacccgtaatgcgctgagctattttggcctgacgtatatcgaattcctcgccattgccgacccggacgaactgcgcgccgcgacggacaaattcctcctttcgcgcgacgccgcacggctgctgccggagaatgaggcgctgtttcgggtggcgctgcgcagcgacgacatcgacgccacctatgaccagttgcgtcgtacaggggtgacagtgtcaccgattgtcgatggccagcgcaacgatccgcagagcaatatcatccgctggcggatcttcaccatctatggcgacactgacgggctggtctatccctttgtgctgcagtgggaagaagacgacgccacccggctgacgcggctgcgcgcccagaggctggacgcgccgcatccgctgggcgacattacgcttgagcaggcggtgttcgaggtggtcaatccgcaggcggtgcgcgatcgctggcaggcgctgctgggctttccgccactgggggagcagggactggacgtgggcggccggcaatttatcttccgtgaaggggctgccaaccagctgaccgaactggtgttccgcgtcgccaacccggcgcttaaggggcagcgctttcgtgtcggcaacggcgtgtatcgctttacataaaggctgactctagcgtgccgtggcgcgcagggctcccggcggctggccggtgatgcgtttgaaagcccggctgaaggccgccagcgactgatacccgaggctgaaggcgaccgtttccagcgcctggccttcatgggtgatgtactgcaccgccagccgcatacgcagctcggtgagatagcgggcgggggtggtgccggtggcggcaagaaaacgttccgcgaacagcgagcgtgaaagacccgcctcccgcgccagatcttccactttccagttgacccccgggcgctgatgcatggcgtagatcgctttcgccagccggggatcgcgcaggacctgtacccagccggtggcgttgccgcacccgcacgctacccagccgcggacaatcagcgcggccaccacgtccgccagccgggcgaggatcccggcatagcctgcctggcgggtgagcgattcccgctccatcgctaccaacagcggctggatctccggccaggtgtttagcaggctgctgacccgcatcacctcgggcatggccttcaccagcggctgcatgccgccgagctcaaagtccatacaaccgctgaaaatgacggcgcgctccgggcagtcaggctggtcgccagcgttgatacaacttaccgtgctgcacaccgtttcgctgggcagctgcgccacattgaccaccgtggcctgcggatccgagagcagggcgtgcccgtcgccgttgggaataaacagcgcatcgccgctctcgagggtgaactgttctccgctggccatgcgcagcagcaccggcccgcggctgatgaaatggaactgggctttacccgccacggcgctaaagccgacgccgaacgggcgtgcggtttcgatgcgccggtagttaacgccggagaggcgcataccgcgcaacagttcgctggtcaggtcgatggcaggctggctcatggtaattccggacgaataatcaataactgaagagtatgcatcatatatcgtccgaaagtaagtccctaagatgaccaggatgttaataaacctggagagttgtatatgagttcctgcatagctgctgacgcgagcctgtctcccgccaaacctgcctggcgcgccgtctatgccctggccctcggggtgttcggcctgatcgtggccgagtttctgcccgccagcctgttaacgccgatggccagcagcctcggcgtcagtgaagggatggccggacaggcggtcaccgcgacggcgctggtggcgttagttaccggcctgctgatcgccaccgccacccgcaatatcgatcgccgctgggtgctgatgttcttttccgtgctgcagatagtctccagcctgatggtcgcttttgccgattcgctggcgtttctcctgctgggccgtctgctgttggggatcgccatcggcggcttctgggcgatgtccaccgccacggcgatgcgtctggtgccggcggcccatgtgccaaaggcgctggcgatcatcttttccgcggtgtctgtcgccacggtggtggccgcgcctctcggcagctacctcggggagctgatcggctggcgcaacgtgtttattctctgtgcgatacccagcctgctggcgctgctctggcagctgtgggtgctgccctccatgcgcccggagagcgtcgggaccttctccacgctgttcagggtgctgcgccgtcccggtatgctgggcggcatgctggcgacgatcctgattttcagcggccatttcgccttctttacctacctgcggccgttccttgagaccgtcgcgcaggccagtgtcgaaggggtttcgctgatattgctcggcttcggtatcgctaactttatcggcacttcggtggcgagctatctgctgagccgtagcctgcgtctcaccctggcgctggtgccgttgatgatgagcgttctggcgctgctgatggtgacgtttggccatctgaccgtgctggccgggctgctggtcgccctgtggggatttgccttcggcctggtgccggtggcctggtccacctggcttgccaccaccgtgccggatgaagcagaaagcgcgggcggtctgctggtcgcctctattcagctggccatcagcgccggggccgccggcggcggggcggtgtttgatttgcacggcgccagcggcgtcttcaccggcagcggtctgctgctgttgagcgcgatggtgattgtcttcgccgccgtacgggtgaaaccggtcgcccgcgccgaccagccggtgacgggccgcttatcccgcgagatcgataactaaattggccgacaggctgcgggagcagcacagcgcaatatgctgctctgcggcctgtttttccgcctccgactgcacggtatcccggtggtcgacggtcccctcgcgtaccggcgtcaggcaggcgccgcagatccccatctcgcaggagagcggcaccgcgacgccatgctcctgcagcacctgggcgatggttttgtcccccggcaccggccagcgctccccggtggaggcgagggtgatggtgaaggttccatccgccgccgacgccgccgtcggggcgggcggctggaacgcttcgctgtgcaattgcgcctcctcccatccgaccgcccgcgcggtatcgcgaacccgggccataaatccgggcggaccgcagaagtagacccgggtgtcggcgtccggagcccccagatcctgcgccagccgctggcgcggactctgcccctcgtctgagcagtggatctggcagattcccccgctcagctggcgggcgatctcggtggcgaaggcggcctcctgcgcacggctaacgtaatagtgcagcgtaaagctggcgccggacgccgcccgggcgtgggccatcgccagcagcggcgtaatgccgatcccggcggcgagaagcaccacatggccgccctcgtgcagcggaaagtggttgcgcggggcagagatcatcaatggctgtcccgggcgcagggtgtcatgaatataacgggagccaccgcgagactgcgactcgcgggcgatgcagagcagatagcgatcctgttcggccgggctgccggtcagggagtactgacggatcagcccgcagggaagatggagatcgatatgggagccgggcgtccacgccggcagcggttgcccctcggcgctcaccagacgaacggccaaatttttcgcgccctggcgccacaggccatcgaccaccaccgggagtatgtcgcgcatatgacctccactcataccagaaagaaatcgccaaagcccatcttcttcagcccgcgccggtaggcgatagagctgcggtccgccggaatatgcgcctccagggtcagatccagcggcaaccgttccggacgctgggtctcgaccatcaggcggtcctcttcaaatacccgcaggttgaacgcatgtacgtcttccaccggcacgtgcagatcgaagttgcgggcaataggtgcaaacatccgcgtcacccgggacgacaccggcgaggcggcgttcatgatcaccagcctggcgtcggcgggaaaatggatggtcagcgtagcggtgaacggcagatgcatttcaaagtgacgcagccactggaacccttccggcgcgcggaaatcggagctggccgggtaattgcccaccgagctccagtagtcggcaacaaagccgaacggcgtctcctgcggggtatagtccggcacctgctggttgtccggatcggcgaaggtgtcggtgtggatccacgcgaagtgggcgacatcgagaaagccttcgacctggcggccggcaaatccctttacctcgaaggccgggcagttgatttgctgaaagccggcgtcgtcccagtgcggcatggtcggtaacggcggcggattgtccggatcgcaggccaggcaggtccagatcagcccgtagcgctcctccacggcgaagctggtgagatgcagtttggccggaatgggttgccccggactggaggggatgcggttgcagcggccatcctcgccaaagcgcaggccatgataggggcagacgatgccttcctcttcatgaaaccccagggtcagcggcaccccgcggtgcgggcagacgtcgcgggcgaccaccacctggcctttaatacggtagataaccagctgttcgtccagcagggtggctttcaccggggcgccggtaatatcgcaggcgcgggccaccgggtgccagcagcgggccagccgcagccagtcctctggatcaaaggtgcaatgggcggggggcgtgggggtgattgtcttcatgatttctcttcctgctcacatcggtgattgttttattgttgtgagattattgttgtcatattagggtgttcacatccatcaccattaattcactctgctgttgcaaaaaagagtacaggggcgccatgagtccattttcccgtttcgcgcactatttcatcgccgtggcccgctacggcagcctgcgccgggccgccgagcagctgcatatttccgcctcggcgattaaccgccagatcctgcaggccgaggaggccttcggcaccccgctgttcgagcgcctgtcggagggactgcggatgaccaccgccggtgagttgctgtatgacaacctgctgcgctggcaaaaggagtttcgccagacgcggcagaaattcgatgagctgcaggggatgaagcgcggaagcgttagcgttggcatggtgcaggcgctggcggaagggggcttcgccgccgcgctggcggagatcatcgccagctggccgtggctggagctggatctgcaggtggctgacagccacaccgtcagccagaaagtgcgtcaggcggacctggacgtcggcctgatcctcgatccgcaggggcaggctggactcagcgtgctggcctttgccgaactggaggtggggattgtgatgcgtccggaccatcccctggcgggggcgaaggcgctgtctttgggcgagctcagcctggagcggcatatcgtgcccggcgcgccgttgatcgtccatgagcgggtggcgctcctctatcgccaccatgactttgcgccggagaataccatcagctgcaatgatatccggcttatcaagtcgttggtgctgcgcggcagcggcgtgacgctccttagcctgctcgacgtgctggacgaggtccagtgtggacagctggcctttgtcccgctgcgcagtacgctgctgcgaccgctgaccctggcgctgtgtactgcgccctcgcgtcagctttcgcggcccgcgcaaatggccattcagacgctgagtgcggtgatcgaatccatggcgacggtcagcccagcggcccgctgaggatggtgtcgcacatgccgttgataatgcgctccccggtctcctcgcgcagctcctggtaccaggcttcggtgagctgcatatccttcccgtgggtaatatcgcaccgtttgcgcgccttcagcaccaggtcacgaacccggtcgcagcgctgggcttcatactcgcgcagggcggccgcaatatctcgggtctggcggaaaacggcgcccagcaccactgcatcttccatcgccgcgcagcctccctggccaatatccggggtggtgctgtgtccggcgtcgccgagcagcgcgacgcggccgcgcaccaggcggctgaaaggttcgatatcatggatttcaatgcggttggtagtctgcgggtcgagggcggcgatcagcttctgcaccggcggcgcccagccggcaaagtagcggctgaggtcagcgcgcagggtgtcacgatcctccgccagacccgccggaagcggcacatcaaagaaaaagtagaaccggccggcggagaccggcatcagcgagacgcgcttgccttcgccgacaaaggtggtccactggtcgccgggggccagcgcttcatctatctccaccaggccgttccagttgacgtagccggcgtagcggcgctgcggggtaaagcccagcacccacggacgcagtgcggaatggctgccgtcggcggcaatcagcagatcgccgctggcgctgctgccgtcggtaaaccataccgtcacgccgtcggcgtcttcttcacagcgggtgacgcgtttgccgaactgcacgctgtcccgtccccagtaatccagcatttcccgctgcagttctgcccgggagaccgggcaggggcggctgccggtgcgttcgatcagcggggcgagactgaactgggtcatgttctcgccgctgcggaaatcacgatacgccatccggcgcagcggcccgccgaaggtctccatgatgtcgcccatgccgaggtgggccatgcacttcacgccgttgggccacacggaaatcgctgcgccgaccggtttgatctctttcaccgcttcatagacgtcgcagtcgatccccgactgtttgagcgccactgccgcgcttaaaccgccgatgccggcgccaatcacgattgctttcatttttttctccttctcccgatgttgtgactgactacagcaatttgcgtaccagttcgctggagggaggaaaaccgcctgcctgaggcacagcgatggctcatgacgcaccgcatcggtgcaatgtgaggtattggttgcctttttatgaatcaaaagtttctgtatgttgcattaagaatctatcgtttcagacgcctggttcagcagcggagaggggtgatgcatcacgagcgtaatctaagttgatgattttggagtgataataaatttattggtgcccttttgtcgtctctggcctgctttgtgcactagcccatgcacttctctttgctacgggatatcactatgtctgacgaacatcacagtggcctgctttacggccttgaacagcggatcccaccgcttccggcctttttcagcgctctccagcatgtgctggcgggcctggtggggatcatcacgccgccgctgatcatcggcgctaccctcgggcttggcgactggctgccgtatctcatcagtatgtcgctgatggcctcgggcattggcacttttctgcagtccaatcgggtatggggcatcggcgccgggatgatctgcatgcagggcaccagttttgccttcctcggcgtgacggtggccggagggatgtgggtaaaagcccagggcggcgggccgcaggatatgatggcgatgctgtttggcgttaactttgtcgccgctctggtgccggtgattgtcagccgctttatcgaaccgctgaagaaaatctttactcccatcattaccggcagcgtgattgcgctgatcggcatcagcctgatcaaggtcagcgtcatcaactggtgcggtggggaaaaggccgaggatttcgccagcatgagcaatatcgcgctcggggcgggcaccctcggggttatcgtcctgctgagctgcgccaaaaaccgctggctgcggctctcctcggtggtggtgggcattgccgtgggctgcatcgcagcggggctgagcggtcagttccatcttcacagcctgggcgacactctgtttcgcctgccgacgctgtttccgttcggctttcagtttaacagcgcgatatttctgccggtcgccctggtgtcgctggtctgtattctggaggcggtgggcgatctgacggccaactcgctgatttcgcaacagtctgttgacgatcgcgctttccgtaaccggctgaagggcggtatcctggcggatggcgtcagctgtatggtggcggccatgctctgtgcttttccgaacaccaccttcgcgcagaacaacggcgtgatccagatgaccggggtggccagccgctatgtcggacgctacattggcgtgattctgatcctgctcgggctgtttcccccggtgggcgaactgctgcggcagatcccggcgccggtgctggggggcgccacgatggtgatgtttggctgcgtggtggcggccgggatccggattattacccagaccccgctgagccgtcgcgatgtgctgatcgtggggctggcgtttggcgcgggtcttggcgtggagtcggtgccggcgtttctcagccattttccgccgatggtcggcgatctgttcggttcggcggccaccagcggtgggctggtagcgatagcgctgaaccttattctgccgcaggagcaggcggcgacgaaatcgttaaggagtcaggatgatcgcgctgagtcagtttaacagcctgagcaaagatgaggcggcggggctgctggccccttgcgtggcgatcccggcctggggcgagatgctggtgagcttacgacctttcgccagccgccatgcgctgctgcaggccgcccgtaaggcgatggctaactggggagaggacgagctgaacgcggcgctcagcgcccatccgcggatcggtgagaagccgaccggcggccaggcgcacgcggcgctgtcgcgccaggaacagtcggcggtggacagcgagaatgagcggctcgcgcaggccctgcgggagggcaatgcccgctacgaagcccgctttggccgggtgtttttaatccgcgccaaagggcgcagcggcgatgagatgttgcaggcgctgacgcgccggctgcagcataccgccgacgaagaagtggccgaggcgcttgcccagctgcgagagattacgatgttaagactggaaggagtgattggcgaatgagcaccctgagcacccatattctggatatttccaccggtacgccggcagaaggcgtaacggtcagcctgagccgggagggcgagacgctggcgaatctggtgaccaacgcccaggggcgtatcgccacctttagcgccgcgccgctgccggcggggcgctattgcttaacagcggaaaccggggcgtggtttgcccgcgccgggcgcgagagcgtctttacccgggcgcagattgattttgttatcggcgaggcggcagaggaccatttccatctgccgtttctcatcgccccgggcgggtggtcgacctaccgcggcagctaagccggctgcccgctgccgggcggcgctgcgcttgcccggtctggagcgttacggagcgggcatagacagccccgtaggcccggtaaggcgcagccgccaccgggcatgtacagatggctccggcgatcatccttcctgttttatccccacacaaggataattattctcctatccccaccaggggataaccttgacattatcccctacagggtataaaaccaagtttatcccgacagggggataaatgatggtgaggaacaaggcgatgaattccccgcagatatacagtcccgtgcagctggccaattacctgaagctgctgcgccagcagaaccactggacccaggatgcgctggccaggcggatcggcattaagcaggccacgctgtccaattttgaaaatcaccccgacaaaaccaccttaaccacgctgtttaagatcctccagtcgctgggggtggtgatgacgctgaacgccaaagctgctgagacggcgccggctcccgataacaacacggaccttgactggtaatggcgacgcttaccacctggatgaacaatgtgcgcgtgggaaccttaacccgccaggctaacggggcgcacagttttcgctatgacgaagagtggctgcgcagcccgcgcgccagaccgctctccctctcactgccgctgcagtatggcaatatcactgccgacgcggtgtatcactattttgataacctgctgcccgacagcccgcaggtccgcgaccggatcgtcaggcgctatcaggcgcgctcgaagcagccgttcgatctgctggccgaagtcgggcgggatagcgtaggggcggtgaccctcctgccgccgggggaagaggcgcacctggaaggattacgctggcagacgctggacgaggcgcagctcaccgctttgctgaccgcttaccagtcggatatccccctcgggatgattaccagccaggacgatttccgtatctcggtggccggcgcccaggagaaaacggcgctgctgcggatgggcgagcagtggtgtattccgcagggcgccacgccgaccacgcatatcattaagctgcccatcggcgagatcaagcagcccaatgcgacgctggatctgcgtgaaagcgtggataatgagtatctgtgcctggcgctggccagagaactgggcctggcggtgccggaagcggagatcatcaccaccccgcggatccgcgccctggcggtaacccgcttcgaccggcgctgggcgcaggagggacgggtgctgctgcgtctgccgcaggaggatctgtgtcaggcttttggtcttccttcagcgatgaaatatgagtctgacggcgggccgggtatcgccgcgatcatgacctttctgctgggctcgagtgaagcgctgaaagatcgctatgactttatgaagttcatggtcttccagtggctgacgggggcgacggacggtcacgcaaaaaacttctcaatttacctgttgcccggcggcagctaccgcttaacaccgttctacgacattatttcggcgtttccggtgctgggcggcacgggactgcatctgcgcgatctgaagctgtcgatggggctcaatgccacaaaagggcgtaaaacagagattaacgccatctatccgcgtcattttctggcgacggccaaagcggtgaactttcccctggagcagatgctggcgatcctccaggagtttgccgggcatgtgccgcaggcaatcgaaagcgctcgccggacgctgccggcggacttttccagccacgtctggcaggccattacagagaacatgctgaagctgcacgcccgcctgcagcaagggctgcaggcgctatagcagagccggctggcggctagctctgcggctgcccccagcggctgcgcaaatagttaaccgcctgccgggtttgcggctgattgaggttgttttcgcggaacaggatggtgccctggatctgcggcagagtctcattgagatcgagctgctttttcagctccggcacgccgccgtccaccgtccagtcaggctcatttttggacggttcacccaccttgtacagcgccacgccgatatacagccgggtatgcgtcggtttaaccacctcggcccaccagttggccagcacatcatagcgcgcggcatcgcgggcaaacggccagtagatctgcggcgcgatgtagtcgagcagtccctgctgcacccagctgcgggtatcggcataggactcatcataggcggccgcgccacgggtatccgaccccgccggatcgtgggagcggttgcgccacacccccgccgggctcacgccaaactcgacgttcggattgagctttttgatagtagtggaaacctgggctatgagctgctgggtgttatgccgccgccagtcgcccttcgaggcatagccctgcccgtaacggcggaaagtctcgttgtcgttaagcggggaagaggcggtttcggtatagaaatagtcgtcgaactgcacgccgtcaatcgggtagttctgcaccacttcagcgacgatgctggtgatccagtcccgtgcttcgggaatgcccgggtcgagaacaaagcgatcgctggcggtgcggatccagttacggtgcaggacgaacacgctggccggtacctgagtaagggtgttgttcagctcggcaatcgtcgacggtttggtgttgaccgagacgcggtagggattaaaccacgcgtgaaccttcatgccgcgcttgtgcgcttcatccagcataaactgcagcggatcgtagccagggtattcgccgattttgccggtcagcatatcggaccacggcagaatatccgaccgccagagcgccgtaccgtccggtttcacctggaaaaagacggtgttgatccccaggcgctgcaggttatcgagtttagcgatcagcgccagcttctgctgcgtgatgcgactctccggcgtgctggcgataatcgacccgaccggcggccagtcaaggcgcgaaacggtggtgagccacacgccgcgcaccggctcccggtgcgcctgcccagctttgacggcggcagcgttcggcggcgtgacaagggatttaggggctttactggtgcagctgaacagcatgccagcggcgatgagcgccgcgcctgccagcgccactttgctggctaaggggaatcgacgagaatggctgatgatgaactcccgtgtactcagatcgtcgcgtgtaggcgctattctcttacgattcgtgggtcagagcaattccttcatccgtcggatcgccatcacctagtcataatgtaaggtataggtcgcgacggccgacacctgaccggcggtgatccggggacgggtctggtagtagcgggcagtgagctgcaggataaaccggcccgcactcgcgctgcccagcgtcatctcatgattcagggcgaccggctggcgatggtaaagcagttgcacgccgataccctgcgcccgatcgtcggtggcgtcattgcgcagaacgccatgcccccgggcggagaggggctccgcgccgtcaactcgcagggaaatcgtgaccgcgctgttgcaatccagctgcagcgcgaaaggggtgtcgccggtggttttgccgacgccgccgaagtggtcaagcatcgccgcagggagcttgatcagggctggcgtggcgtcattcactgaacatcccgcggtgctgatcctgccggttaagtctaacgcggccagcggggtatgctccgccattaaaaagcgctcgctgtgatactcaagctcgcccggcgtcgccgcgggaccggttttaatgagctcaatcgtcaggcggaaatagcccagtttccacaccgcatcgggcaaggcggcgggattgtccacccgttggctaaacggcgagggcgtcggccggtcaggaaagccgccatagccgccgatagcgcgcagcgatacgcgaacgccaatgccggcgaggttagtttgataaaccgtcggtcgcgtcactcccccggacagcagactgtccagcagcagcggtgacagcccgtgcggatcgtccgcgcagcggatccactgttcgccgccgtcgctaaggcggttccaggcgaaacttttatgatacagcggggtgccgggtctggcgtcagccggaaccgtgagctgccccacgttcagccgaagggtggaggcctggccgcggacaaacactggcgtacaggcccatccgctggcggccggtaacagaataaataacagcgtcagggcgacccgacgcaggagagttaaaaaggacatgataacgtctgctgtaaaatgagtggatggggggtctgcgccagcgtcggggtgagatcgtagcgggcgctacagcgctgctgagggcccggcccccattgcgcataaagggtgccttttggcgccaggccggccaggtacacctgaccctcgctggcaacgatgctgttggtgtccttagcgcgtacttcgctgccaaagggcagcggttgtccccgcgactgcagcgtaaacagcgccttatagccaacgtgggtgtgaaagcgcgccagaaccaccgcgtctttggtagggaccagcgtcacggtgctgttggccagatccacattctccggcagcgaatggctgtcgagagagacgtcgttgcggtgataggcggtggcgaagggcagcacggcgtacccgtcaccattggtggcgatggttttctggttggcgagggtcacaccccctgcgccaccggcgtcaatcaggacgacagcgccattcatttccggcgtaaagactaccccgtggcggtgaatcagaatgcccccgctggcgccgtagttcagacgagcggcctgcgaatcgtggctgtagccgagattcagatcgccccttccactgctgtacccggccgtcaggctgccgctggacccgttttgccgatcgcgggtttggctgacggcgtagctaagcgcgtgattgtccagcaatgtgccgttgaggctgaccatctgactaccaacgctgtggcgggaggaggtcagggtatagccggcatagctccccggcagcaggtggctcaacggcacggaaagtgacaacgtcaccactttgtcggaatgcggctcgtcatcctcctcgtcaccgtggctgctgcgggagtcgctgtagctgagcgaccacgcgataccgtgaacccggctgctgatccccatattggcggtacgctgtgtggcgccccctgaccagtagctgtcctggtcgagactcagatagagggtgatatcgtacggcaggctctggctggcggtgatttgcagggttgcttttttgttgtcgctatcctgcaggtcgtcgtcgctacccgggctggaaaacgcctcgctcagcgtggcatagcgctgatgcgaataacgccagccggtgaaagtcaactgcgtgccgagacgatcaaaacctttgctgtactggagctgccaggcccggccatcgatcggatcctgctggtgccggtcgcgggcgtttaacagctgcagcgagagcgccccggcttctcccaaaccctgtcctgcgccgagcgagaggttatggtattgcgccgcgctctgcagtccgccaaacagcgtcaggttatgggcgaacccgcgcatcagcgacagctgcatcatcaacggccgctggctggcatcgtcgctatggtagcgcccggcgaccaggttgtatttcaggctgccttcgcgctgcatgctggtcaccgaagcatacggctgggtgaagcggcggatttcgccatccgactctttgacggcaacctcaagattgccgctgctggcggtgggataaagatcgtcaatcacgaacgcgccgggggtgacgtaggtttgatacagcacgtagccattttgccgaaccgtgacctgggcgttggttctggcaatcccgcggatggtcggggcaaaacctttctgcgagtccgggagcattgcatcgctggaggcgagggatattccctgaaactgtaccgcgtcaaacacatcgcccgacgtgaaggtatccccgagggtcagttcactctgccagcgcgtcaggtcgcgctcaagccaggcgccgctggtcgtccactggggcttatcatcgctgttggcggtcaggctattgctggcgcgcaggcgccaggcgccgaggttcacgccgcttttcaacatcagatagttatcgcgctcggtgctgccctcgcgggtacgctggctggcgcctgaataacgatagttactctgaaaggcgctaataccttcgtcccacagcgcagagggaacattatccctcgcccggtgcgtcatcagcgcctgaggaatggtcattaccagccgctgatgagcaaaatcgaaattgaccgtgctgcccggcagcagcgcgttgagttcgggacatgagcgggacgttgcgctgggcgcctgagacagcacggccgggttaactccggcctgcagcagatcttccggcttaaggcagggcgtgagctgtccgcgatcgttctggcgaaacgtgacggtcttacgggcgtccagcgtgacgccgttgacctgccagctcaccggataggcgcctggcggctggcccgcctgctgattgaagcgttgcagatccactgccggcaaatggtcgtttttctccagcagatccatattaaaggtcgcctgggcgtgcaagagcgcgctctgtccgcccagcaggatggagaggctgacgacggtaacggtatgagccgggccgtggcgcatcgcgacatcagacgcttagtgcgccgaaacgggggcgctaaacgtctgcacagcgccaaagtcatccagaatgcgccagctcacctcgcgggcgcaggcctcgccggggagggcatactcttcacggctgtgaggagcaatcacgctgcgctcaagcggcgttttctggttctggcccgcgcaggtgagcgtggtgatagtcacataatagggggaggcattctccgcctgcaggtggttgccgctgatccgccagcgcaggtgctgcgccgcgtcgagcgccgagccagggagccctgccgggcgataaatgagcttcagttgattcttaatagcaaattgcagaatgttctcgccagccggcgcggtattggcgggaatcactttgatattcagggtgaataaactctcacggtcagagggcagttgcggcgaggttaataacacgcgcagatcgttgctgtctccggcatccagacggaacaatggcggggtgacgataaacggtgatttattattatcagccagatcgtctacccagctctgaataagcaccggatcgtgaggattggtgttttttaccgtgatgtctgcctcatggctttgttcattataaatgacacgtgtgccggcaatggcaaccccggcggcagacgccaggaacgggcaaaagagaaggctcaggataaaagccgctttataacactgcataattgaggatccggtcacgaggaatgagaataagggcagggggacgctgcccttggaaaagtggcaatcaggacattctattcgtacacaatatcaatattggccgtggcattaatattgccggcggtgacatcctgtgaggaatcgctcttcacatcggcaataaagttaaatgcaatatcaccgttttcgtcggcttgcgaaaccgccgttttgctctgcttgtcaaaggtcagctgagtgccttccgttgagccgtcaggggaagagaagacttcaatgcccacccctttggcggtatccgcggagtcggagagcgccagcacggcggcgctggtgccgttagcgttggtatccggagtaccttccaggctgatactgatgttctgcgccagtgggcagccggtgaggttgatggtgaacggcgtttctgcggttttcgcttcatgggatttcagcgccgacatatcgacgttgccaaaatcgacattaacatcgccaccgttattggcgatctggcaggactcgttaataattttaccggtgaaattcagtgtacccgccgcgcgggcggtggtcacagtagccagacttaaggccagcagtgaaccaacaaccagcagggtgcctttttctttcatactcaaaccttattaaataatcacaagttaacaaaagcatttaacatttttaaagcatgttttttatttctgttcacaaaaaacggtaagcatcgctaatgtatattaccgtcgggggcgggattatacggagaacatcgtaaaggcccattgataagatgtgttaagctgtaacattatttattttttggtgtaagtataatctcattaaatattaaaaagagtcccatgcgtataatgcattatttccgggagataactgttctgagcaaattttacgaaaaagttgctgttaatcccggcagttgaccgggtggcccggaataatcatttacgctgccgctattttgcagtagcgtggagtgacggcaggaagccgcaggttgtagggcacagaaacgatgctgtgccgcgcagtgtcacccgttatcaaggaagattgctatgtctccatttcgtctcgctctgctatgtctgtgcctggcgccgctggcgtcgtctgctgcgctttccggccaggttcatttttcaggacgggtcatcaatccggcctgtgttatcgccccccggcacgatcgtatcgatgtctcgtgccagcaccattcaccggaacaggtcgccttgacaaacaaccgtcctcgctacgccatgctggacaatcgtggtgaggtcagtattcactggcgaaatgcgcagcatagcgaagcggatgtcattattcgctatcgctaaggcgggataaaggcaatgaagagtaagctgatgcaaggaggtaaaggataaaccgttgtgcggtttacgcgcgcatcagccataaccagcgggcagacgcgcgcgcagaaaatcattcatgaaaacaattattgccgccgcccggcggcagaatcaggtgtcgtctggcgcccaagcgagctccgggatcggaaagcggcccaccgtcatagagaaagggaagcaactcagcggatccgcgactgttcatcgtcgcgtaacgtcagcacctcaaaaccgttggcggtgacggccacggtgtgctcccattgcgcggagagttttttatcgcgggtaaccaccgtccagccatcttttttggttttgatacggctgtcgccctggttgaccatcggctcaatggtgaacaccatgccttcctgcagcacggcgccttctccggggcggccgtaatgcagcacctgcggttcctcatgcatttcctgaccgatgccgtgaccgcaatattctctgaccacgctatagccatgttcctccacccagcgctgaatagcgtggccaatatcgcccagcgtcgcgccaggcttcaccacctcaatgcctttccacatcgcttcataggtagtctttaccagccggcgggccagcggggagacatcgcctatcaggtacatcttactggagtcggcaatcatgcccgctttctcgagggtgatatcgacgttaacaatcatcccggagcgcagatgttcggtcgctttggggatcccgtggcacaccacatcgttaatggaagtgttcaacacatagggaaaatcgtattgccccttgctggccgggcgggcgtgcagctggttgacgataaaatcttccactcgatcgttaatcgccatcgtcgttacgccgggaacgataaaagtatccagcatatcaaacactgacgccagcagctggccggcatggcgctgccgggcgagttcgtcggcggttttaatgattattgatggcattgatcacctccagcagacggtcagagccggatttcagcatcagcagtttgatctgctggtggttaagctcagggtagagttcgctcatcatgcccagacggatccagtattccgcctgggcattgacggagcgggacatggctttgctggcatcacgaatatcatcgtgcagcagatcggagattttgacgattcccatagatatataccgtaatgattcgtatatacatcgtatacaatccagcgcgggatgtccttggcattttgtggcgtggatggctagcaccatgcaaaaaagcccgaccagcgggcttatattcagcattttttcgggttaaaaattcgcgctgtgcaccatggcgaaaattacccattagattatcggtatgcagaaagaaaataacatgatggcgacgcatcaatatattttatgcaggtgttaattttgcgtattaatattctcccgtcaggccgggaatccgaaggatttacagcgcgtcagtgagtttatccaccaccactttacccgcattatcgaactgcgtaatgcggaaactgtcgctccaggagcggcgggtggtgaagcggtcaaacagggatacccggcctttgcgatggccatctttacttaaaataacccattcggtcaccgaagaataatgctggctattgtcatgccgactctgttgttcaacaagctggtcttctttttccacttttaaataatcacgcaacatatttaacctccatagaaagtattattaacattactccttttatttattctttcaatcaaactttttaatcaataaaagtaactattagtgggcgacctaagtgcaaaaatcgcggggaatatcactccttcggacggcctggtccactacgcttaatgagagcgtccgccgcgactactgcggtgtccgggtcagaaagaggccaacaaaaggccatatccttgtattcttaataggcgtaattctgctatatctaatgcgttttgccacgaccgagccacagagagcgctgtaccatgagtaacgatcacctgacggatattgcctatcgccactttattgaaagcgttaaagattatgccatctatatgctgagcgccgacggcacggtcattagctggaatgagggcgcccgccgggcaaaagggtacctgagcgacgagatcatcggtcgctacttcggtctcttctatagcgaagctgagcaactctccggtgtacccgcaaaaaacctggaaatcgccctgcgtagcgggcagtttgaaggggaaggctggcggtatcgcaaagacgggtcccgattctgggcgcatgtcatgatcgataccatccgcgatgagcagaacaccctgctgggttttgccaaaattacccgcgacattagtgaacagaaggcgattaacgaccgcatcgcctggatggcgcgctacgatgcgttaaccggtttacccaatcgggtggagttttttgaacgggtggagaagctgatcactggaaatgatgcccgccgctttgccattttcacgatcgatttagacaaatttaaagagattaacgatctgcagggccatctgattggtgaccagctgctgcagcgcgtggcgggcgccgtgctcaaaacgctgcagaaggaggagatggtcgcccgcttcggcggcgatgagtttgtggccgttaaacctttttccgatgagggtgaagtggatgcctttgctgcgcgcctgtggcgctgcttcagcggtaagcagacgtttgccgcgacggaagtggttctctccgccagcattggcatctcagtctacccggaggacggcacggatattaatacgatactgagcaattccgatctggctatgtatcgggcaaaaagcagcctcgaccataagatttgctggtatgaacgtgaaatggatgacaagacgcggcagcgcaatatgatggccgccgatatccggcgcggtattcacgccggggagttttcgctccactatcaggctatccgcaacatcaaagatcgtagcatcaccggttacgaggcgctgctgcgctggcagcatccgcagctggggacgatcccgccggacgtgtttattcccatcgccgaagagagcggcgccatcgtgcccttaggttactgggtgctcgagcaggtgtgtaacgaatcgctggaaaatggtttgaacagaaaagtttcggtcaatatctctccggtgcagttgcgtcatcgtagctttatcgaaaaagtccgcgagatcctgatgcgtaccgcctacccggtcagtctgctggagtttgaggtcaccgaaacggcgtttgtgatcaataaacagctggcgttcagcgttctgcatcatctgcaaaaaatggggatcagtattgcgctggatgactttggcaccggttactcctccctgagcatgctgcgcgattttcatttcgacgtcatcaaactcgaccgcagctttatgacagatgtggagagcaaccctcaggtacgctcattcgtgcgagccattatttcgctgggcaattcgatcaatacgccgcttatcgccgagggggtggaaacggctggacaactgcagatcctcgaagaggagggatgtgacgaaatgcagggatttctgttcggcgagccggtcgatatcaaacacctgcccgaccggcgctgatgcgcccaccctccgctggtgggcgtaagggcgttactgatgcgcaagcgctgcctgcccggaaagatgcagcagcgccgagcgcagcgagacctcgaacatctgaccgtgcgtcagaccggggtagcgccagaaggctacggtcaaccctttactggcaagctgctgttgggtttgacgcaacacctcaagcgaggcctcgtgcccggacggctctccacgggctttaccgtcaccctcgagtaggtacagcgatttcccgcgaaagcggacggcatcaagactttggcttgcctgcaaaggcgattgcagggcctgacctagcgacgggctggcggaatagtagatcccgaacggcgaagccttcctccacgcgtcgagcacaaacaatccgccgtaggagtggccccagatagcgcgctggtggggatctattttcaggttagcttccgtctggggaaccatcgtttcggtcagcagctggcgaaaaacatcattgcccccggttttacgcggcggtagcgcgggtttcccggcgcgaggctcatgcgtctttagcggtggggtgtaatcccaggcgcgggctgcggtatcaaagggcagcgcggtctggtagccgatagcgacgatcaccggcggggagccggcgaagagctgctgcagaaacgcgtcgtcgagtttatccatcaccgcgttgccatccaacatatacagtaccggatagccggcggcgggcggggctttgtccggcactgcggtccatacccggtagtgacgttcgccatcggcagagtcatactggcgttgcgtaaagtggtaaaacgccgaccctttatccgcaatgttcggccccagcggctgaagatccggccgggcaatactgccgctgctgtagaagagtgcgccaatcgccagcgtcagcagcccgctcgtacgacctgttgtgatgctccctgaactcaacttcacctcgtctgtccccctgttttgttgcttctggcgttattgttgggctgacacgttagcacagcttttatgataatggttctcatttctttttctggcgttgccacaaactgtatgctgggggagcgggtgacgggataaacggagatgacgaagataaggaccctgtaggcggtcataaaagaaaattcaggaacgatcgtgaaggtgactcaacagttttttgaccagcggagtgagcgcaataaacagcagcgcaataattacgatcagcaagagcgtcagccctttatggtggctgataagcaccaacagcatcgccagcgtcatggtatgatcctttaataaatggcgttaaccaccgccaaggtgaataaaattcaacagaatggttatgaccacccaggccagcagcagatagcgtcgtttatcgcgtcgagcttccagcgcagcaaaatagttagcgctgtaccaggtcgatatgataatagccagcgtgatgatgacctgccagatcgcctcgctgaaaccggtgacgatgcttatgccacgaaagcagaggacaatcgcaataccgttaaacgcattacacatcagccatccccacagacttgcgggtcggctaaataaatatcccaatcgtaaaaccaatgtcgtattcaccctgcaaaaataatcgcgctgtaaaatgcattttaacgatcgaacaggtattgatataaatcaaaactaatggaataccgcaggaatcactggcgtacggcgctatcagcgcgagcaataaacctgaggatcagtagccctggagaatatttaactcattgttttaataacattttagttatgagatacctgcggtaacgtgcgtacttcaagcaagtagcaatacgttggtttctctggttattattaccattgaggttataacggggagaatcagattattcgccatgtttgctgggcgaggggtgaaaatccgaccggggccagagctccggtcggtgtcatacttaatggggcaaggcgttatgctgcagaattttcaggaaatcatgtttgtctgagattaatgacagtgcgttagcgatcagctcatcgctaaatatcgaggcaatttccttgagtacgtcaatatgctctttctctttcgcgatcacgccgatggcaataaacattacattgctccgatcccagattacgccatcaggaaactgatagatctcaatcccggttttaaggatgatatccgtcgcggatttcggcaaatgcggcagggtgatgccattgcctaaaaaggtcgagacctgatgttcacgctccagcagaaagtggacacattcctgattgacatagcctttggctttaaactccgcgccgatcatggcgatgacttccgctttattactggctttgcagccaatatgcagattatccagcgtgatgttatcgatcataaccaacctccctggtgagacgagtggattttttatcttcatggtttgctgacagctctgcttctaactgctcaagcgatttattagaggtctcgggcagggcaaagaccacgaaaagaatggctaaatagttaatggcggcgaagataaagaagactggcccaaggcccagttttgcctgcagcagcgggaacagatagctgaccaccgcgttcatgatccacatgaaaaataccgagatccccatcgacagtccgcggaatttcagcgggaacagttcggctaataccacccaggtaataaagcccatggagccctgcatcacgccgacgaacagcgcgcccagcagccagatggcggtagctttcaggtcacccaccagggtgtaatcgacagcggcgataatcagatgcagggttgccataatggcgaaaccgtagatgatgattgtcttacgtttgaagcggtcgacaaggaacagtaccccgatcagcataccgcccacggagaaaacaccgttcagcacgttgcagatcagcgaagtacgctctgagaaaccggcggcactcaggatttccgtaccgtaatacataatgacgttaacgccggtggtttgctgcagtgcggcccaggtaatgccgaccagcaaaattttgaggatccagggtgttttgacaatcgtcgcaaaggtgctctgggcgctgtacttattaccagcttcaattttgatcagggtagagatgtcatcgtactccttctgcgcgcgttccgccgggcggatttgtttgaggatatgcagcgcttcatcatgacgatttttgctgatcagccagcgcgggctttccggcgcgcgccacatgccaacgaacaggcagatggccggaatcgcttgtaccagcagcatatagcgccagacgtccggcagatggccccagatgatgccaatgatcgcgttgatggcaaacgccgccagctggccaatgacgatggcgacttcattcaggccggtcagcttgccgcgcatctcggtaggcgccacttctgaaataaaagtgggggcggtgaccgaagcgccgccgacggcatagcccagcagggcgcgggcaatcagcagggtagtgatatcgggggccgcggcggaaagcaacgcgccgatgagaaaaacaaaggagagaaagagtaaatatttacgccggccgaagtaatcggcaaatttgccgccaaacacgctgcccagcgcggcgccgaccagcagaacgctcattaccagcccttcggtggttggggtcagcgccatgtactgcttcagtgaggaaaaggcgccgttgataacgccggtgtcgtaaccgaaaagcaggccgccgaaggtggccactaaggtgatctgatgaagtcgttttctctgttgctggttcaggtttgttataaatgacatggtagtccctttattttgttgaacgacacaagataaaaatacatctccccagtcaggatttatcacgcctgtgttgtcgtatctaactgaattaaatgattttcttctttatgtaattgctcagcacaaggcagggtacgctaagcaatggcggtcaaagaggtttacggcttggtgttgacatggatgtagtcgatatccgttctcctttgcgggttagcggtctttagtgcgtcagtcgcgacgacatttgccgatgaacagcgctctggtgtggcacgttgctgtcgctccggcgatttaccgtggtaagaatatggcacaaagaaatggaatgaacatgcaacaagatcacattatgaaaatttaatttcaattcagtgttgcagaatggtaaatgcatgaagccaatcacaaaggctaaagggagtatatccccatgaaaagcaggttaaatttacagtgatgtaataatgatgttgttttcagtgggttaatgtaaatcgaagaatactacgcagatcacatttttacgccataatattgaagaatagaatttatatttcattgtcacgttcggggcaaaatgaagatagaggccttttacctccggtctgaaggggaaatgagcggttcgctttgcccacgggggcggaggttaaggatgaatgcaccaccgggggaaacaccgggtaaaaatgcagagaagggggattctctgcatcttacccatcacgaaaaagatcagtgcagtgcgggccagtagccttcgttggcgacgatcagttcatcgaggatggctttcgccaccgaagcgctgggcaccgttttcgacagggcgatggcctgccacagtttctggtaactgccctcaatccaggcgtcaaccaccagtttctcaactgccacctgctgctccatcaaccctttctggaatgacgggattttccccatcgccagcggttccggaccattaacgcccaccaggcaggggacttccaccatcgccgtctcatcgaagttggcgatggctccgttgttctcgacgatcaacagcatccgctcctgggtgttaaaggcgatggcgcaggcgaggtcgacgataaaggtggcatgggccccggcatggaaatgcgcgccttccgccgtgccgcgacgggtgatctcccgggccatatcaaagacctctttttcgcgtccggccatcacctcgttggcccgcgtaaactccgggtcggaatgcgccacttcatagtccgggtagagatagtatttcagataggtgttaggcagcgtcgacggatcgagggcaaacacatccttcacctttttaaaggtctcgatccaactcggcgccttatgctgaaagtcttcttttgggctgctgtatccctgctccgccacgtgacgcttcagcgccggcatcaaatcgttaccggctttatcggtgatgctggtccaccagccgaagtggttcaggccatagtaacgaacgttcagcgctttgcgcgacggcaggccgaggatgtcggcgaacagaccctcgatagccaccggcatatcgcagatgttgatgatgcgcgcgtcgggccgcaggcgacgggtcgcttccgcgacgatagccgccgggttggagtagttgagcatccaggcccctggtgcgtactgctgcatataatcgaccagctccagcaccccggcaatcgagcgcataccgtaggcaatcccacccggaccacaggtctcctggcccggcacgccatatttcagcgggatcttttcatccttttcccgcatctcatacaggccaacgcgaatatgcgccatcacgaaatcgacgtcggtaaaggccgcctgcggatcggtggtatagctgaacttcacctgtgggaagcgttcagccaccaggatggcacaggcgtcgccgatagtcttctgacgctggtgatggttgtcatacagacggatctcccgcaggggaaagcgcgacatattttccagtaacatcatcacaatcccaggggtataagtactgccgccgccggcaatggtgaccacaaaattatctttcatttaccacctcgttattcaataacacccagactggcgttgaccgccgttcgaattttgttaactcccaggccatagataacctggacatggtttcctttaatcagcacgctgctcccgccgctctctttcaacagcgtctgctggataagggcggggtcccgcacatcaacccgcagacgggtaaaacagttgcccaccgcacagacattctctttccctcccagcccggcaatcaccagcgcgcctttatccggatgctcgctattagcctgttgcgaatgctcatcttcggctgcggtttcgcggcccggggtgagcagccgcagacgggtaatacagaaggtgccgaccaggtacatggtcgcggtttccagcagaccgagggcgacaaacaccggccagcgcgtcgcgctgactcccgccgggaggttatagacgacgaaatcgatgagaccgttagtggcgcagaccctgacgtgaagcagccaggccagcatctggaaaaaaccgtccagcagggagtagataagccacagcaatggggcggtgaagataaagagaaactcaaaaggttcggtgatccccaccaggacggaggtaacaatcaaggggatcagcgtgactttcaaccgctgcttattctccggtttcgccgtacggtagaaggcgagcgccatgccggcggtgccaaaaatcttcaccatcccataggtgaggaaacgggcggaatcactgagcgcgtcaacggggtggcgggcgatttcggccaggaaaataggcttagcgccaatgacggtctgaccatcgatcagcagctgaccgccgatagaggtaaaaacgaacggcgaccagatcagatgatgcagcccggtggggatcaggaaccggttgagaaagccgtacaggaagaccccgatggcgccaaaggatttcataaagccggtcagcgccgagatgcccagctccactaccggccagagatagacggtggcgatggcgaacatgccaaccagcggcagcatcacgatcagcaccagcttactgttgccgtagatcgacagcgcgccgcgaaactcaatcccaaccacgcgattatggacaaaggcgacagcgcagccaaggataatcccaaggaatacgcccatatcgataacctgaaaaccgaagataaaagtttgtccgctgccgtacagttgcgcgttggtggttccggtcgccaggcgatgggtgagggttagccagctattattcgccgccaggtacatcagccaggtcatggccgccacgaaggccgcttcggccttgcgggttttcgccagaccgctggccagcccaaggcagaacagaaacccaagatggttcatcagcgcccagagcatactggagacaaatttccccatcaggtagagcccgctgctttcatccacccacagccggttggtcgtcatgctgaacagggcgatcaacaggccgatagctggcagatacagtaccggcccgatcatcgccttggaaaagtcctgaagctttttcactccaatcatggttgtcctctcgtctttgcagaccgctgtcatcacctgatgaataggcttatcagactaggagcagaccaccgggatcccgagcaggaaaagggccatctgtgacgaaagtcatatatattgttgctggacagatatataaatatggcgtgatttatagatgtgtcattgttgattttttcgctgagagataaaaataatcatttaattacatgaagttattcatgcttgccgttgactaacgccactccatcgagacatctaaaagtgatttataaaaagattgccactgaactgcggacccgcatcaacagcgacgactatgccgtcggcgatatgctgcccagcgaaaaagcgctcgccgcggagctgaaggtctcggtgatgacgctgcgcaaagcgctggcgctactggaggaagaaaagctgatcgcgcggcggcacggcagcggaacctgcattgtgcgtaaaagtaactatcatggcggggaactggagggctttaactaccagatgcaggtggtgggcgtcaccaactaccgtaacaaagttattgaatttacgctgcttgatgccccgccagccattgcccagcagttaaagatccagccgggggagaaagtgtattacgtcagacggctgcggctgatcgatgaggtcccaatcctggtggaaaacagctatatccccttcgccaccttcccctggctcagcgtgggtaacctcgagcagtctaagttcaactatttcaaaaaagagtgccatatcaccatcatcgagagccaccgcagctataccccggtgctggcgacccgtgagcaggcggagctgctgcaggtggcgccaaacagcctcctgctgcgggtgcagtcgatcagctacgcccagaaccgggcgatcgtcgatttctcagagatctaccagaacaccagtaagtacaatgtgaagcacattacccgccgctagaggattcagaccagccatccccgggcgatcagctctatccccagcgccagcaggaacaacagaaagccctgacgaaagcgctgcgggctgagacgcgagcggatccgctgtcccagccacatgccgagcagcgccggcaacagcgccagcgccgaaaatagccatgcatcatcatgccagccatcgtgcagggcgaggccggccgccaacgccagggtggaaagggtgaacgacaaccccagggcctgcaccagctcgtcgcgacgaaagcccagcgcctgtagccagggaacggccggaataacaaataccccggtcgccccggtgataacgccggtcagcccgcccatgagcggcgacagccacttctccacgcggccggaaacctgaaacaccggactgcagagcgcatacccggcatagactatcaatgcggcgccaagcgccagcgccgaccaccgaggattgaggccgatcagcagtgaggatccggccaacgtgccaataataatcccggtcatcataaaccagagacggcgtacaatctgcgccagcgccgggcctgccagtaactgccagagattggtgagcagcgagggaaggaccagcagcgccgctgcggcctgcggcggcatcagcaggccaagcaggcccatcgccacggtgggcaatcccatgccggtcacccctttgaccagcccggcggcaataaagatcaacaggaaagagatcgtgtgtaaatcgaacattatggctcacttttcaggggagaaaggggcattgaaacagctggtcgtgagggccacaatgcggtatgttggccatagactacggaaaaaccgaagggaaaggagggcctgatgcgactggatctggccgatctgcggctatttatcgccatcgtggataccggcagtatcaccggcggagcggcgaatgcccatctggccctggcgtccgccagtgagaggctgcgcaagatggaggccgagatcggcgtgccgctgttgcaccgtcatgcccgcggggtgacgatgacagaggccggggaggtactggcgcgccatgcccgcccgcttcttgcgcagcagcagcgtctgcgccaggcgatgcacgccttcgcctgcggtcagcgggggacgctgcgcctgttcgccaacacctcggcgatgtcggcctttctgccggggaagctcgccgcctggatggcagcgcacccggcggtgcagatcgaaaccgaagaacgcaccagcgcggatatcgtcagctgtatcctggcgggcgtggcgcaggccggagtggtgtccgatgcggtcgaccccgggccgctgcgcctcgatcccgtcgctgacgacccgctggtgctgatcgtgccgccagctcgccctctggccgaaaaagaggaagtggcgtttgcggcggtgctcaacgagccgttggtcgccctctatcagaccagtgcgctacagcagcatatcgaacagcacgcagctgaactcggccaggcgctaaacgttcgggtcaggatgagccattttgcagggctttgcgagatggtggcgcacggcgccggcggggcgatcctgccgcgcgttattgccgagcgttaccggcagcgctattcgtttgccgtcatcgggttacaggaccgctgggcgcagcgccgtttgtgcctgtgctaccaggatgacgccagcctgtcgccagcgatgcgccgcttactggaatggcttcgtcagccttgagaatatcagtgacagtgtcacttttcatgcccgttattgctactgacatccgtgccagagatgcgatagtagaggtccgcttttattaagacgcgaatcaggacagacaagatgagtacattaccaaaggtcgcggtgctgggactcggcgccatgggacacgcttttgccagtaacctgctgaaaaacggctttaccgttgccggctggaaccgttcgccagcccgcggcgaagacttacaggcgcatgggttatctctgcacgccacgccgcagcaggcggtggccgatgccgaggtgatcatcagtatgctcgccgacggcgaggccaccctcgaggtactggcgcaaatcgcgcccgcctctcagccgcaggcgatctattgccagatgggcaccattggcctgccggagacccggcaggccatcgcgttgttgcgggaacttcagccagcgatgacctatatcgatgccccggtgtcggggaccaaagcccccgcggagaaggcacagatcctggtgctcgccagcggagatagggaaaagggcgccgctgccgaaccggtgtttgcggctatctcccgcgggacgcaatggtttggcgaggcgggcaacagccagaaaatgaagctggtcctcaatgcctggctgatttcgatgatgcagggcatcgcggagagcgcccagctggcgaagacgctgggcttcacccccgaccagctgtggagcgccctggaaggcggcccgctggcggcgccctatgtcaaagtgaaactggacgccatcgccagcgagcagtataccccgcagatgcagctggcgcatgccctgaaagatgcccggctggcgctttccctggccgagccgcacaccatgccggggctggaaaacatcgccgaactgtggcagcaggcggcggacgcgggatatgccggagaggatttgtctgcggtatatcagtggctgtcgccgtcgtcaaaagcgtagtttcctacccacgccaggaaagaagtggccatagtggccacttatcctggcggatggggcatcaattcgaatctaccgtacgttagcttaagctatcaatccattcgctctggcgcggattcagccggcgataacagtgtaccgacaccgccagctgcgtcaggtcggtgaagaccatcggatcgagctgtatatgctttttaatttgctgcagccgataggtgagcgtattacgatgaatccccaacagcagcgacgttttgcccggttcggcattattggcaataaagctgctcagggtatccagcagcacttcgccggaatcatgctcaagcagctggcgtacgttattgataaaaaaattgaccatatagctgtcttccagcaccctgaacaggcagagcattgccatttcgcgaaagtagtagatctgccgctgcggctgcactttgctacccacttcgatcaccgagcgggcgaaccgaatggcctcgcgaatgtccggggcgctgtccgcctgcacgccaatcccgatatggtaatggcttatctgattactcagtacaaactcaatgccccgcagcagagtttcctgggcttcgcttagcgcgttgaggatcaatatttcatggctgcccagcaaaataacgtcacttacgccggagagctgcgagaattcccgcaacagcgtactcagtatgtcgcttaactgatgctgttcgacctgcacggtcactacgatcggaacccgcggtgtatcaaaatcgaaaccaagttccagcaggcgatgaagcgcttcttgcccggcgggcgtagccccttgttccagatactgacaaaacaaggtgtcacgcagacgttgccgccagttggtttcccgcatctctatggcctggcggaccagcagttcggcggtgagcaccgccagttcagcatagcggcttatcgccgcgggatcgccgctgatgcctaccaccatcaccacgcgatcgtcatagataatgggatgattaataccaggatgcacgttgtgaaaacgcgcggcttccgcggcgttgttaatacaaatgcgtttcccggtgcgtattacctcccgggcgacttcatgctgttcgccgatacgatgccgttcacctgaggcaatgatctgtccatgatggtcaatgacattcacgttatgatgaattatcgccattgcccgggcgacaatttcattagccagcgctgttgtaataatcatacagttatccgcttatgtgcctctccgtgccacccgctcagaaaggttcgtagaacattctccgcggcgtcggcgaggagcggttcgcatgtgttcatcgactctgccagcgccatagggcgctggcaaatagaccacattgcgtcaatatggtgttgatataattgccggctgctctcatcacgcccgccgcaaagggccacaaccggcacgccatggcgtgcggctttgcctgccacgcccaccggggccttaccaaaggcgctctgccgatcgagccagccttcacccacgatcgtcagcgcggcatcgcgaagatggtcgtcggcgttaagcagctccagcaccaggtcaatgcccggacgcagcgtggcgccggtataggcgataagcgcagcccccataccgcccgcggccccggcgccgggccgtccgctgacgtcgaatccgagggtttgcgtaagcagctggctataatgcgccattcccgcctccagctcgcagagcgccgcctcgtccgcgcctttctgcgccccatacacccaggtggcgccatgctcgccaagcagagggttagtgacatcgcaggaggcctgtatttcgctttgctgtagacgcgggtccagaccgctcaaatcgatgcgctgaatatgcgccaggtcctgacctgccgcgggagccggcagcagggtgccgtccttacgccagaatcgtgcgccgagcgcctgggcaaaaccgatgccgccatcgttggtcgcgctgccgcccaggccgataatcaaatgccgacacccggcgtccagcgccgcctttacctgttcgcccagcccgtagctgctggcctgacgcacatcccgctgcgctggcggcgtgagttcgagcccacagctttgcgccatctcgataatggcccgctcgccgggcaggatcaggaaatccgcctgcaggtagaagccataaggcgaggtacagcgctgctgttgccacaccgcccccttaagcaacggactatccgccagagtcgacagcagtccctctccgccgtcggacacgggcatttcgaccagctccagcgtctggtcaacccggcgcaatccctgggctaccgctgcgcaagcggcctgcgcgctacagctacctttaaacgaatccagcgcgataacaatcttcatacgttctcctgcgttaatgcgctttgcgcggcgttttatcggtggtcatgagctgtaataacatccccagcagcgcacatcccgccatggtaaagaaggcgtagatataacccgctggattttcccagccgccgccaaactgaatgagccagcccataagcaatggcgaaatgccgccgccgataaacatcgccgtggtgataattccgttagcggtagaggtggcgcgttcttcggcggagtccgacgccatggcgtagtagataggccacacggcgttggccaccaggccaaaaaatagctgaatggcgataaggcgcggcatattggtggcgaaatagaacagcgcaatgccgatactcatccacagaccgcagacgatcagggttcgtttacggccaaagctatccgacagccagggccagattacctgacccagggtaccggtaagcgtgaagataatactcagcccggcggacgccgccagcgacaggccggagacgtgataaagatacgggggcagtacaacgttaatgcccatatagacgatttgcgtcagcagggtattgcccgccgtcagcgaaatattgcggttgcgcagggtgcgtaaaaaggtcttcatcccttcgcctttggcgacatggctgctttcctgcgtcgccgggcgcgtcaacccctggctgtcgatatgctgataaagcgtgttgatgcggtcggcggtagaatattttgcccagaagatcattagcgggatggcgacgagcagcgccagcaggaagcagtagcgccagctgccttcgccaaacgtggcaagcaccaggcttgccaccacgccgctcagcagcgcgccaatcggatagccggtatgatgcacccccagcgcaaaaccgcgcttctctttcggccaccactccgcggtgttgctgacgccgacgggttcgccccagccggccccaaggttgacgcccacgcgcagcagcacaaaggccgtcagcccgtggctgatcgctttaatcccggaaataaaagacagcgcggtatagcccagcaccagcggtacctgaaagcgcgctcgtttccagccagacccgtagcgatcgctccagatggagccgggaatatccagcaccgcaagggctaccatgatcagggcgacgatattgccccactgttccggcgagagcgagaactccttagagatgaccgggccaaggcgcaggatcatctcgcgatcgtaggcgttaagcacccagattagccagcaaaccagtagcgaaacccaggagaagcgatgtatcagccgctttttgccacgttgttcaccggcaggtgtgtgattgattgttgtcatagtcgtgtttactccgcggcgtcgcgacagcatgatgcgcgccgcctggtgtcagggtcagagtcagttcgccgggtattattgttatcgcggcgagccggtgattcgtttagccggcgaagcgccgttccgctacgccggtcacgcccaggtcgtaaatggcgaacaggctgccgcgcagctgattatcttccgggaagcgcggcaggggcggctgcgccatggaggtgacgtacagcacatcaaggttttcgccgccgaacatcacgctggtcacttttttcaccggcatctcaatgatgcgatcgaccttgccctccggggtatagcgcaccagcttgcccgcgtagaccagcgcgttccacagatagccttcgctgtccacggtggcgccgtccgccgcgccgccttcgctgcgatcgacatggcaaaagacccgttcgccggaaagatcgccggtcgcggtgttgtagtcccaggcgcagatttcgcccgtccaggtatcggcaaaatagaaggtctcgccggaggggctccagcagggggcgttagagacgataatgtctttcttcagcacgtgcagggacagatcggggtccaggcgatatagcgcgccgctcggttcctcttcgcgcatatccattgacccgaacagaaagcgtccctgacgatcgactttgccgtcgttgagccggttaaagggtcggtccgcttccggatggtgcaacagcgtcagctcgccgctggcgaagtcgagcagatgaacgccattctgcagcgccaccaccgcgccttcgccgttctggcgcagggcgaaagagccaattttctgtcgcacgtcccagctcttgatcgcgccgccctgcgcgttgcaggcgaacaggcgcccgtcgaggctgtccacccaccaaagacgctgctgttcgacatcccagaccgggctttcgccgagtcgggtttttaaatccagtaacacttcaatacgcataatggcctcctgattacactttttcgccgtgggcctgtttcgccgatacggagcctggggatgaggaacttttgagaaacagggacaccagcgcgccgataatcagtagcgcgacagcgaaccataagccggacgttgccgcaccggtgcggtcctcaaacgcgccgagaataaacggcccgagaaagcccccgcacagcccgaggcagttgagcaggccgaagctgcccgccagcatatgcccgctcatgatggatgggagccagttaaagatgatggattgcatagcgaagaacatgaaagcggccagcgagaagccaagcagcgccacaccgtggccggcaatggcgccaatcgccatgccggtcgccatgaccagatatccggccatcagcatgctgcgggaacgctgttccgtgcgggcgaatcgcggcagcaggatcccacccgcggcggcggcaatccacgggatggcggtcagcagaccaacctgcagcggagtaagctggccccagctaccgatgatccccggcaggaaataactcaggccgtaaaccgaaaactggtgggtaaagtaaatcagcaccagcaacaaaaacactcgggtggacagcgcggttttcagggagaaacggctcggcgtatggcgcgtttcctcggcttctttcgccagtaccgcgttaatggcttgcacatcgtcgctgtccagccagcgggcgtcggctggtttatccggcagtctgcgccagacgacgaacgccagcgctatcgcaggcagcccttcgataaagaacatccactgccagccgtgccagccggacatgccatcaaggcttaataacaatccgcccagcggcgcgccgataatattggccagacagacccccagcaggaacaggccggtggcttttgcgcgctcttcgcggccaaaccagagggtgaggtagtaaataatgcccggatagagtcccgcttcggcggcgccgagcagaaggcgcatcacgtaaaaggacgtaggcccggtgacaaacgccataccgcaggagaggatgccccaggtaatcatgatgcgagctatccagcgccgtgcgccaatccgggtgagaaacaggttactggggatctccagcactgcgtaggtgagaaaaaacaacccggccccgaggccgaatgcggttgcggaaaggccgatatccaccgacatggtcgctttcgccatgccaatattggtacgatcaataaagctgatgatgtacgccacgataagcagcggcatcaaatggcggtagatttttttatgggtgcgttgcagctgcgtcccgtttaccgccttttcatttattgcggacatggttattatttccccgtattcgtggtcagaagccttgccgggatcgagacgatcccgttcgtcagctcacaggttgtcgccgggtgctgacccgaacgacgcccggcccgaagccccacttcgggccgtcttttgctaagcgccttcgcgctcgaacagcatagaaatcccctggccgccgccgatgcacatggtgaccagaccagtgcgtgcgccgctgcgcgccatttcatacatcagtttgacaggcaggatcgcaccgctggcgcctaccgggtggccgagagcgatcgcgccgccgttgacgttaacgcgggccgggtcgagacgcagatcgttcatcaccgccagcgcctgagcggcgaaagcctcattgagttcaattaaatcaatggactgcacatctatattgagacggtccatcaggcgtcgggtggcgggagagggaccaaaccccataatctccgccccgcagccggcgaccgcccagccgcgaatgcgcatgcgcggggttaagccgcgtttttccgcctgctggcgggtcatcatcaccagcgccgccgcgccgtcgttaatgcccgatgagttggccgccgtcaccacgccgtcggctttaaacgccggacgcagcgtggcgagcttttcacgcggggtgtcgcgcgggtgttcatcggtcgcaaacaggcgggtcgcttttttgccgtccggcacctcaagggccaggatctgctcgcgaaagcgaccctccgcgatcgccttcagcgccttctgctggctcgaccaggcaaaatcgtccatcgcttcgcgggtaataccgaagcgttgcgcgacgttttccgcggtgatgccgttgtgataagggccttccggccaggtgagaatggagatcaggccatcttccagctcgccatggcccatgcgatagccatcgcgcgctttacgcaggtagtagggcagctgggtcatattttcagtgccgcaggcgacgaccacctcggcctggccgctttgcagctgcatcatgccgtccgccagggcctgaagtccggaaccacactggcggttaacggaataggcggtgctctcctgcgggatccccgcgcgcagttggcagatgcgggcgataaaaccgctttcggcgatttgcccgacgttgccgacgatcgtttcgtcgatatcctgcggcgcaatcccggcgcgggcgatcgcttcgcgaatgacggcggccccaaggtcatgctgatgggtatgtttaagactgccgttaaacgtgccaatagcggtacggacgccgctgacaatcacaatatcattagcctgggtcattgtttttctccttacagcaccatgccgccgccgacgttaatcacttcaccattgatatagcgcgcgccatcggacgccagaaacgccacgcactcgccgacgtctttcgcctcgccggcgtaacccgcgggaattttgctgatcatgatttgccagacgttttccggtacgccgcgcgtcatgtcggtatcgataaagcccgggcagatggcattcaccgtgacaccttttttcgccagttcgcggcaggcggttttggtcattcccaccacgccggcttttgacgccgaatagttggtttgcccgacgttgccaagccagctggcggaagcgatattgataatgcggcccgcaccgcgctcgcgcatgcggatagcggcctgctgcatacagaggaaagtgcctttcagattaacgtcgataaccgtgtcccagtccgcttccgttaatttgtgcagcatggcgtcgcggttgattccggcgttattcaccagaatgtctaccgggccaaacgcctcttcggcctgggaaaacagggcttcgacctgcgttttttcagcgatattgcagctgataaacagcgcctgtgcgcccgattcgcgcagggaagcggcggcggcttcgccgtgtgcatcacgatcggcgataatcactcgcgcgccttcccgcgcaagcacctgggcaatgccaaagccgataccgcgtgcggcgccggtgacaatggcggttttactggcaagtttcatagcaacgttccttatgagtcagaggatgaattccgggacagatgttccgcgagaccgcagggcggcggggcgaacaatcggctgtccataacctgaagatccgcggcgatcgccggatgaaaatccatatgcgccaggatgtcgcgctcaagatcgatgccgggggcgatttccgtcagcaccggtccttccgggcgcagttcgaaaaccgcccgttcggtgacgtaatgcatggtttgtcctttggcgcgggccagttcgccgttgtaagaaatctggtttaccccggcgacgaatttacgcacttcgccttcgcggcggatatgcagcgccccgtgttcacaggcgatctccagccccttggcggtaaaagaggagcagaacacgacgtggcgggcattctgggtgatatcgataaaaccgcccgcgccggggcaggatgcgccgagccgtgtggcattgacgtgcccgtgcgggtccatctcgccggcgcccataaaggtgatgtcgacccctgcgccgttgtagtagagcatttgatcctggtggctaatcatcgcgctcagattacggccgataccgaaatccacgccacccgcctgctgcccgccgtagatccctgactcgacggtgatggtgacctgctccccgagctgttcctcgtgaatgatggcgccaatcacgtcattgggaataccggtgccgagattgatgacgcagccgggggtcagatagcggcaggcaatccgcccgataagcttgcgcaggtccagcggcagcggcgcattttgcgcggcgggcagctggatatcgccgcacagcgctgggtcgaaggcccagcttgaagtctggcggtgatccgtctgcggctcttcgcacaccacaatggcgtcgatcaggttgccgggaacggtgatgcttttcggatgcagcgagcctttcgctacgcgatatttcacctgcgccagcaccttcgccccgtagcgtctggcggcgagaacggcgtgcaggacttccagcttcatcacctcttcatcggtcgtgaggttgccgtcttcatcagcatgggtgccgcgcacaatgaccacgtccagaggaagagccggataaaacagatattcgtcgccgcgaaacgtgacgtgctcgatcagattgggtcgttcgcgggtgcgggcgttcatccttccgccctctatgcgcggatcgacaaaggtaccgagaccgacgggagaaagccgccccggcagtccggcggccatcgcgctatagagatgaacgatctgcccctgcggcaggcaccaggcttccacttcgttgttgttgatcatcgccatccagcgcggcgccaggccccagtgcgaaccgataaggcgggtcaccatacccggatgggcaaagtgctggataccgcgctggcgatcgctttgccccgcggcatgcagtagcgtcaggtcacgcggttcgcccgtggtcagaaagcgcgcttcgatggcgcttaaaatggactccgccgcgccgataagcgtcatcccgacggtgcagacggtgtcgccgctggcgacccaccgcgccgcctcatgggcgtcgataaatttgctgctcactttttatcctccgttgatagcgtgatgatggattctgcgagacgcgttttgagctgctgtttgctcactttgccgttgtgggtacgcggtaaagcacgggtgaaaataatgcgcgccggtagcttaaaacgggcgattttgaccttcagccagtcgaggatctcttcgctggtcaggtgatgctggccatccggcacgataaacgccacgggctcttcgccgtagaccgggctgggggtcgggatgacggcaacttcccgtactccccgataggtagagagaatgttttccagctccagtgagtaaattttctcgccgccgcgattgatcatgtccttgctgcggtctttgatgtacagccagccttcgtcgtcgagatagcccagatcgccggtacaaaaccagccctgcgcatcgcagctcgggcgtcgctcgctgtgctgccagtattcgcggatcaccacatcgccttttagccagatatggccgatttgtccggcggggaggggctgctggcgatcgttgcggatggtaatggcgagacccgggatcgcctgacctgaactgccgcatttatcgctgccccagacgtcgcccggaaaaatcgtcgcaggcgaggtcgtttcggtgaggccgtagatcggctgaatcgcggtatgcgggaacagggtttttaactccttgatcagtccatcgctcaggtggcccgcgccgcaggcaatcgtgcgcaatgccggaaaatcgccgggatggctggcgctctgctcacgcgcagcctgacaaagaaggataaaaatggtgggcgagccgtgcagaaaggtaatgttctgctcgcgcagggtggtgatcacctgcggggcattgaaccgatgctgcagccagatgctcgcgccgaggctaataaacagcgccagcagcgccgacaggccggtgatgtgatagataggcaccgccagaatggtgctatccgcggcggtgagattcagtttttgcgtataggcgtcaatcgcgcagagcaggttattgtgggtgataatcgcccctttaggctctccggtggtgccggaggtgaacatcatcaccgccgtatcgtcgcggttaaccgggaccggcgggcgggtcagcggttcgggaaggcagagcgcctgccattcgctgagtgaaaccgcacgcgcgtcaggggtgtttttcagccagtcctgtacggtcgcatcgaacaggacaacctggggagcgatatggcctaccagcgcctcgctttcggcctgcttaagcttggtgctgaaaggcaccacttcgatgcccaaacccagcgcggcaaaaaggacttcgcaaaaagcggggtgattgccccaggccagcagaatacggtcgcctttgcgcagcgaccagccgcgatcaagctgcgccatcgcccgctgtacccgcagatgaaaatcgcggtacagatagcgccgatcctcaaacgccagcgccagggcatccgggctgcgggcggcgctgtggctcagggcctggtacagattctggaagtcggcggaggtgctgttcatgtgtctctcctgatatcgcgtattgagtaggagtagtctggggaaattcaggagaggaaattgccgaatggctcacaatagaaaatcaacaaaacagaagcaattttgtaacattgcacaatgggcaggagagaccgggtgggggagagatatccgcgaatcaaaccgacgtgaataatgccagaggacgctatcttttagacccgtattaaccgggcctaaaagagtgaaggggtcagccctgccgcttagcgtttacaggcatcgaactcgagccgttcgccatcggggccgcgaataagcaggaagcgcacgttgtcttcttctatcggcccttcatcgagcggataaccgagcgccgccagccgctgctgcaccgcatccaggtcgctgacttccagcgccagatgatcgataccgcagcgaggggcgtcaaagggcgttccagcgggaagctgatacagctcgaggacggcgcccgccatttccaggaacgcaacttcaatagtgccctgtggcgatggcttgctaaaccgctgctggcgctgaaagcccagcggttcatagaaggcaagcgaacgcgttaagtcactgacctgatagccaatatgagcaatcgtgttgataagttcgcgcatgttatacccccttacgcacgcaccagaagccgtagaaagcgacatacacaaagcacaggagcggagcgataaaggcgatttgcatattgccgccgttcatatccgagataatgcccatcaccagaggaattacggccccgccgataatcgacatcaccacgatcgagcctgcggtctgggtatctttccccatccctttgatcaccagaccaaagttcgtcggccagcatggcgccatacagaagctgaccagaatgagcgcatagaccgccagcattgaaccgctgaaaacggcaatcagtaacagggcggtggcggccagggcaaacgttccgagcagcatcgccggattcagacggttcatcaaccaggtggccacggtttttcccacggcgtaaatcaccagagaagccagcagccagtaagtcgcggagtgctcgctggtgccttgctgcacgagctgcacaaagcgaatcgtgaagctccatacgccaacctgggcgccgacgtacaaaaactgcgacaggatcccgaggcgaaagcgcgggatagcaaacaggcgtttcagcgttggccccatgctttccgtcgggagttgctgttgttgagcgggcgcgcccttgcacgacgggaatttaataaacacgaacaccagcgccagcaccaccagtacggagccgataatcagatagggcccgaccacctgaccaaccatctgatggcgtgcaacgtctgcagcggcggcgggcatcgccagcagttgttcatgactcggatcgttttcgccaaagaccatcagctggccaattaatacgccggagatcacgcccagcgagttgaagatctgcgaaaagttaatacgctgggtggaggattgaatcggacccagcaggctggagtaggtgtttgccgacgtttccagaaaagagagtccgcaggcgatcactccgaggcaggcgaggaatgcgccgtaggtcatgatctgtgcggccggaacgaacaggaagcagccgagggcgtacaggcacagcccaataataatcgccgctttataggaaaaacgcttaatcagcgccgccgcgggcagggcgacaaaaaagtagccgaggaaaaaaatcgactgcaccagcgctgtctgggtatccgttaaatcgaagccctttttaaactgggcgatcaaaatatcattcaggttgcccgccatcccccatagcgcaaacaggcaacagaccagtaaaaattgcagccagggggtatggggtaaatacgcactggtgtccagtttttctttttggaccgctgcgttatcgaccttatccgtgattagcgtactcattgagctatcctcttaatgttttttatacagtagggtttatgccatttcataatcagcggcggcacggagaagccgttcctgtgcctccaggtactcaggtaaagatgaggcgccttgcttttcgacactgacggcggcataggccgccgcgaatcgggctgcggcctgtagcggttccccgcaggccagccgcgccgccagcgcgccgttgaaggcatcgcccgcaccggtagtgtctcgggggtgagaaggaaagcagggaataggggatttcaccccatgctcgctcagcagggcgccgctggcgccgagagtgataatgacgttgcgcgcgccctgagcatgtaacacgtcggcggcctcagccgcggccgtcagactgtcaacccggcgtccggtcattaacccggcctccgtggcgttcggtgtaagtaaatccactttgcgtagaagggcgtgctcaacgggctgccagggcgcgggattaagtattaccagggccccggcttgtttgccggcgtctatgacctgttcaatagcagaaagattgttctccagctgaaccagaaccacatccgcgcagccgatagcgggaatgcagccggcgatttcatcatcggtcaccgtcatattcgcgccgggatcgacggcaatcatgttttcggcatcgttaccggcgacataaatcagcgcattgccggtggggatctcttcggcgaccagcagcgtcacagcattgaagcccacgcctttcagatgacggcgggcaaaatggccgaaggtgtcattgccaatcttgccgatatagtggacatttgctcccgcttttagcgcggcggtggcctggttcgcccctttacctccggcgctggtcatacttccgcaggccactaacgactcacctggtaccggaaagcgatccaccctggcgaccatgtcgaaattgaatgaaccaaaaacacagacttttcctgacatcattcgctcctctataccagctcgggggagtgcagcgcggcggacagttcgcgggacatggtttcccaggccagctcgagcggcatatcagcgcggaataaaccgctgctgcccatcactaatatctgtgcgccggcgcccagcagcgcgcggtaggtgttgcggttacaggagccatcgacttccagcaagaagcggaggctgccggtctctttgagctgatgaagctgcgtaattttggcgagcatttcaggaataaacggctgaccggcatagcctgggtcgacggtcatcaccgtcaccttatcgagcagatgcagatagtgctggatgctctcaaccggtgtggcgggattgagcaccattcccacctctttccccgcctgacgaagcatattgataacccggaacgcttcgcggcagatggtctccggatgcagtgagaaggcgtctgcgccggcgtctaacagcgccggtataaacgaagcgggcgcttcgaccatcagatggacatcgataggaagcgaggtgtagggacggatctgcgccacaaagctggccgacaacgccagatttttgacatagtggccgtccatgatgtcgacatgcagcctgtcggctttgctgtttagaaagcgcagctgttccgtcagcttcatcatgtccatacacatcagcgagggagaaaggtaataacgcataaggcctcatttattccggtggtggctgaattcaggcaaagtctggccctgccgcggtaagcagcgtttcgacattgcgcgtattaaccgtcacgtcatgacggcgtactcaggcgatttgcaggctgacgttatgccaggtcatctctttttccagcagcggatcgacaaacctttcagtcaccagacagtccagctcgcccagtccgccgatacgcgcgacgcctgttcgccccagcttgctgccgtcgaccaaagccacagtctgacgggcggccagcagcatctgtttcagcagggcggcgtgggcttgcgtacccgcatacaagccgctatcgcgctccagcccctggcaggagaaaaagagcgtatcaatggcatattcgcgtagcgttcgtgaggcggtttccccgaagaacgactcttcggtcggggagaaatcgccccccagcccgacgagatgcaacgagcgtcggctcatcagagtttgtaagatgcgaatggagggcgtaatcaccgttaacgccatctccggcatctgccgggccaaaaaccagctggtgctactcccgtccaggacaatggtctgtcccggttggagaaactgcagtgctttacgggccacgcgcattttgccttcgctgtgcagcagcgttctgtgctgaaagcttccctggctatcttcaactggcagggcggatgccgccgcccgggtcgccggcagcggattttccgccgccagcgctccaccgtggcttcgggttaagatccctttgcgttccagctcgctcagatcgcggcgaatcgtttccctggagacccgagtcgcttgcgcaatctcatttacccgcatgacgccgtgttggcccagcagttcaacaatcaaacgatgacgttccagcggcaacatagctctctcctgaagtacataatcagattacctttcccttgcgcagagcgttgagacctcgggaatgtcccacgaaggcaagctatccgcagccgaacactgtgatagcgcacgcatttcgcttcacttccgtcagcggtttgcgctatttcgcccgtgattcaggcataaacaaaaacaaacaaaaataaatgcaagattgcttttgcgcccatttatgcccgattacgcctgctctgcaaggttaacgcttatttcctgctgctaattaaaaacaaatgaaaataaaaaaatgctaatttgatcacgttattttcatttaatgcgtttttaaatggatttaagccaaatatcagcattaaatgaaagcaattaaaaacaaaggacaggataagaccatgaatgaaacaacccgtcgttttgcacgtttagttgatctgagcgcagttcaggccaccagtaccgaagcggatgttcgcgcctgcgccgagctggctgccagatacaacattatttccgtccacgtactgccttgctggacgcgctttctcagtacgttgctgccgcagcagggtacgggagaggtgatgattggcggtccggtcggctttcccggcggtgggcataccaccgataccaaggttcaggaagtgcggcagctgattgccgacggcgctcgggaagtggatatggtcgtgaatatcggcaaagtgctctccggcgattatgactatgtgcgcgaagatttgcgccgcgtggtggaagccgccgccccggtaccggccaaagtgatccttgaaacgcactatcttaatgaggagcagattcgtcgcgtgtgcgaaattgccgtagaggtggggatgaagtgggtcaaaacctctaccggctgggcgcccaccggcgccacggtggaaaaagtcagcatcatcgccgaccagcttaaaggccgaatcgatatcaaaggcgccgggggcattcgcgatctggccacggtgcgtgcgctgtaccagcttggcgtgcgccgctttggcatgagccatggcgcggtaaccaaggtgctggctgaactggagcagcacccggaacgttttcccgagctgaacgccgattaaactgagagaccgcgggcctggtggcccgccttaagacgtcaccggagttagtgatgaaagataaaatactcacgattgatgttggcactggcagtacccgcgccgctattgtgcgcattgacggcgcgatgatcggctttgcgcaaagagagtatgagcaaaccacgccgcgtgcaggttggtcagaacaggccccgtctttatggtggcaggccgcctgcgactgtatacgcgaggtgctttatcgctatccagaaacggcagcgcagattgcggttattggtgcttgcggacagatgcatggcaccgtccttctggacgaccgtggcgagctggtggaggatagggcgttgctgtggaatgataagcgcagccagccgcaagttgacgcctttaacgcgcgcgaaggttgggaaaagtggctggcgcatttgaataatccgcctgcggcagcatggcccgctttcaagttagcctggtggcgcgaaaatcatccggatcgctggtcgcagctcgccaaagtattaatgccgaaggactatattaatttcatgctgaccggtgccatggcgaccgattatagcgaagcgtcgtgctatttcctgatggacagcgaaacccgtagctggtcttcgcaagcctgcgaaacgtttggtctgcgggtcgatcagctcccggagcttaaactttccagcgacataatcggccaggtgacgcagcgcgcagccgacctgacgggcctgccggcgggtatcccggtggttgccgggacgtcggatatggcggcctctctgctgggctcgggtgtgtatgaaccggggatggcgtctgattcaaccggcacgtcgacgctgatgacggtggtgtcgccgcggccgttacaccatccgctggttaataatctacatcttgccaacgcggcctggggcggatttacgatcctcgacgccggcggcgatgccgttcgctgggcgcggctggcacttgccgataaccagattacgcatccacagcttttacaggaagcggcggcggtgccggcggggggagaagggctgctgtttcttccctatctgacgggagaacgtctggccgaacacacgaactcgcgggcacagttttttggcctgcagcgcaagcatcgccgcggtcatttattccgcgcagttctggaaggggtggcctttgcatcctggcgcaatcttcggcagctgcagaagtgcgggcagtatccgcaacaaatgatcgcttccggcggcggcgcgcgcagctcgctgtggcttgaaatcaaagccgcggcgtacaatctgccgatattatctacgcgtaatcaggagaatggcgtcaccggatgcggtattatcgccggggttggcgtagggttgtacgccgattttgccagcggcgtgcggcaaacggtgcagttcgacaaactgatctcaccggatccccgtctgcgggattattaccacgcctgctgcgagctttttgatacgctgtaccggcaatccgctgccttatacgacaggctggatgcgctcagcgtaggacccgactgatacgcaaaggtaagccgtaacgtgccgtaaaaaagagagaggcagaatgtttgcagaagaaagacaggagaagttactcggtattctcagggaaaaacgcaaagttgctgtttctgagatgtgtgacgtctttaatgtatcgggcgccaccattcgtgccgatctccgccagctggaagaggaggggctgctgacccgaacccacggcggagccgttcttcgtacccgggcaagctttgaacaggcgtcggacgatcgcgaaattgtcaatctcagcgcgaaagagcggatcggccagcgcgcggcggcgctggttgaggatggcgacattatcgtgctggataccggtaccacgacgctgcatattgcgcgtaatattcgcgacagacagaacgtcacggtggtcaccaatgattaccaaatcgcccgggagcttgaggccagcgcctcgattcaaactattctgctgggtgggatcgtcaagaagggataccactgcgtggtggcaattaacgggcgttccatactcgacacgctgaacgtcgataaagcatttatgggcaccaattcgctgtcgctgaaacacggcgcctgcgtggccgatatcatgctggcagaaacgaaacgaggcatggtggaacacgccagtcaggtgattattgtctgcgactatagcaagctgaataacacctcgcttgcccaatttaccgcagcagatcgcattgacaccgtagtggtggatcgtctgcctgatgacgttcaggcgtatcgtaatgctggcattcaggtgatctctctggatgaagaggagcatctttagtgcgctgctgtgacgttgtcactaaccagcgcgtcgtaaaaccccgtccctcagggcggggataaagttccgggtattcgactcacgtgccgggggatatcgaagaccaggcatggtacaggcggtccagaattgattaaagcttacccgctgactttctcagttcagtaatatccctcttgggcgattccccgaacatccgcgtatattcccggctgaaatgggacaggctttcgtaaccgaccgcataggctgctgtggtgacatcgtaatgttcattcagcatcagtcgcctggcttcattgaggcgcagccatttctgataccgtagcgggctcatccccgcaagctgcctgaaatggtggtggaaagagggcgtgctcatttgcacccgacttgccagttcctcgacgcgtaaaggtgatgcaatattggtctttaaccagtcgatagctttaccgatacggtagccatggccgtcgactgctgcaatctgtctgagatgatcggactgatcgctcatcaaaagccggtagtgtatctctctttggatcagcggcccgagaacaggaatggcttcaggttcgtcaagcaaagaaagcagacggcagaaaggctccagcaaagcatcggtaatagtacctatcccgacactcgttcccgcgtctcgttttttgaccggcggcaggcttccctgggcaattaattccattagcacgcgctggtcaagcttataggctacgccgacgcagggctgggatgtcgaagcctgcaatatttccgaactggccggcaggtcaagagaggtaatcaggaatttttccgcattatattcataaggttcacccccaacccacatgatcttcgcgccatcggccaccagaacgatactgggagggaccaggcagcttaccgggggagcgggttcgtttcggcgaaacaattcgagcccttctacggcggtagggaaatcgtcggtgccgggtgtgcgctgtgcaatatccctcgatagctcacccagcagtatttcaaccgatttgtcaggaatcattctgtaatgccccacacttttgacctcttttgaggttatcaacttagcagctatgaaaactgaaatacacgctttgagattaggttcagaggatcaggcaaataatgcagagtattttaataacaccttttattaaagacattcaaaataataactctgaaatgaggcagtgtcctgaaatcagggttcaccgcgagcaaatttaacccgttcaggtttaagccattttttaactgccacgacggcatcgctgcgcttgagaagtggtttgaagaaattggtacgccaacacgtcttgaacagctgaacatcaaggaagcagatctgcccgctatcgttgagaacgtccagatcaatgtcaaagcgtttggtatcgccagtgattaccggccgaaagttgtaactgaaatactcatgcatgttgtctgaaataggtccctcaatatccaatgaaaggttttaatatcatgacgctaatatcttcgacgcgcttttttaatggcgcactccttgccggggcgatggctctgatttcaacagaagttgcggtggcccagcctgcaccaggcacagcagattcttcaggccgtctggttcagacgtgggataaaactttcccaaggagcgaaaaagtggatcatcaaaaagttacttttaaaaaccgttacggcattacgctggccgcagatgtgtatcttccaaaagatcgcgggaacaagaagcttgctgcgcttgttatttccgggccttttggcgcggtaaaagagcaggcctcgggtctctatgctcagactttagcagagcgcggattcgtgacgctggcatttgatccgtcttataccggtgaaagcagtggtgaaccccgcaatattgcttcacccgatatcaataccgaagactttatggctgcagtcgattttatgggactacaaccttatgtggatcgtgaacgtatcggtgtcatcggtatctgcggcatggggggattgccctgaacgctgttgccgtggataagcgcgtaaaagcggtcgttgccagcaccatgtatgatatgagccgcgtaatgtcaaaaggctacaatgacagcgtaacaccggagcaacgcgagcaggcgctggagaagatgagtcttcaacgctgggaagatgcagcaaacggcaaaccggcataccagccagcctataataaactgaagggcggtgaagcacagttcctcgtggactatgcggactactacatgactaaacgcggctatcatccccgagccgtcaactctggcaattcatggtccgtgacaacgccgatggcctttatgaatttcccgctcatgacctatattaaggaaatttctccgcgcccgatcctgttcatccatggtgaaaaggcgcattcgctttacttctccaaaacggcttatgaagcggcaaatcagccaaaagagctgctgattgtaaaaaatgctacccatgttgatttatatgatcgtatggacaagatcccgttcgataacatcactgcatttttcaacaaaaatcttaataaataagccatagcaccgtccggtgttttcagatgcagtgtctgtgggacaaacgacagatactgctctcttagcatggggtgttgggtattctattgttactgataaagctggcactaattcctgatgcgatattaatttccgaatattatcgagttaatcctgcgacagaaaaaagcaaccgcatatgaaagaggagaggtatatgtactggaaccctgaagtattaacaagaatagatgcggccgacgacctgaaaatcgcaccgtatcatcccgatatgaatacgaccggtacgccgacatggatatgggaagtgaaggtggacaaccgacttttcgtccgagcctatagtggtatccgttcaaaatggtatcaggctgcattgtcccagcaggcaggtaagatactggctatcggacaggaattcgacgtactgttcgcaaaaccctcggaccctgagcttgaaagtaaaattgatcaggcttacctgaaaaagtactccggcagcagctatgtttccgcaatgacagggatacgcgccagggcagccacgattgagattctaccttcgtgatgtcctgtcaaagtgatgctgcctgtactgtgaggcaaaatctaccttccgtggcgtcagtgtgaagtcgacatcgttattgaggctacaggattattcacggaccgtgaaaaggctgctgtacatatccacagcggtggcgccaagcgcgtgattatctctgccccgggtaaaaacgatgatttaaccattgtgatgggcgttaatgagagcctttactccccggataaacactacgtgatcagcaacggaagctgcaccaccaatggtcttgcacctgctgcacaggtcctgcaccagcatttcggtattaagcatggtctgatgaacaccacccatgcctacaccaacagccaggcgctgcacgatcagccggaaaaagatctgcgcggggctcgcgccgccgcattgtcgattgtgccttactccagcggcgcagcgaaggctctgggtaaagttattcctgagctggatgggcgtttaacgggatactcgctacgcgtccctgtgccagtggtgtccattgttgacctcaccgtcacgcttgagcgagatgtgacggtcgaagaggtgaacaatgcttttcgcgaagccgccgcagcgggacctctgaaagggatcctgggttatagcgatgaaccgctcgtctccagcgattaccagggagacccacgctcgtcgattatcgacggtctatcaacgctggtgattggcggtaatatggtcaaaattctggcgtggtacgacaatgaatggggattctctaatcgtctcgttgatctggcattgatgatggcaaagcgtgaaagctaatccactgtgtgttgtattcatctgtaaaagtataagcagttcagctggatgaatagtggctcgagtatcattcatagatgaaacataacaaatctttctgaccgcgatataaaagcataaatgcccgagagagcatttatgctttttcggcgatgaacggaattgcgatatgttgtagtcaggtgctccctggtggtagctaatcaccagatacaagggaagggggaggtgaggcagagcctgtcaacatggaagccggctgcgttgggcttcagtacaccattcaacttcagctggcggttctgtttatggtcgcgatggcactcgccatttgagtgcggaaaacgaagctggcatctttttgataatcacgtctgtggctgatcaagcccggttgatacacactgcaggcggcgcgctatcaaatgagcatttcatctggcatcccgtgacgcgttcggtcagaaaatgcaacagcagtaagatatgccggacagtacaagcagcaggtgtggctgaatgaatttccctggcttttactgtaggagaacaggctgtagtgggcgaagtgattgttaaaagccatgcttgatttatcacctcgaacattttgccttatagcgcagcattcacgtgcatgaaaggaatgacggtcatagtgttgatgtgggaagaggcagctatcaaagatgacgttattgagtacgacattgcatttaacataatatacattatgcgtactcatgttgtagtagctaacttgagatgtccgtctctgaccaaatagacatgtccgcgctacagtctcaccacagcgatcactgcttttaaagatagtttcccaatcaaaggattctgatgacggatcatgcaccggcatttttactttggatgaagttaaccgactctaaatcattcatgacgttgtcgaccggcgtctgaccactcagatggccgcgcagcgcctgggtattccggatcgccagtgccgacgccttctctcgcgttacaatcaatcaggcccactgagtatgcctaaccgccgtcgtggataacccagcaataaccagctacctgatggtcttgcccggtacgcactcaatattatccgcgaacgctataccgactttgggcctaggcttgcgtatgagaatgttgtctacttgtgaaaaaaactcataacaccattcaatggcgcatgctggttcccttcataccagtgcaataccctgtcacatacataattgctggcaataaaagaaggaacaccgaatgaagtatgtgaatctgggtcgtagcggattgaaagtctcccgtctttgtctcggttgtatgagttatggcgaacctgaacgtttgcctcaaccctggtccctggatgaaaaggcgtcacgaccgctcattcgtcaggcgcttgaagccggcattaatttttttgataccgcgaatatctactcgggcggtagttcagaagaaattacaggaaaagcgctgagagagatggccagacgcgacgagatcgttgtagcgacaaagaccttctttccgtggcgcaactcacccaataccgggtttctctcccgcaaggccatttttaagtctattgacgatagcctgatgcgcttaggcatggattatgtggatctctttcagattcatcgctttgactactccacgcctgttgaagagaccatggaggctctgcatgacgtcgttaaagcaggaaaagcgcgttatatcggcgcatcttctatggaagcctggcgctttgcaaaaatgcagcataccgctgagcgtaacggttggacccgatttatcacgatgcaaccgcaatacaacctgctttaccgggaagaagagcgcgagatgctgcccctgtgtgaagaccaaggcgttggggtgatcccctggagtccgatggcacgcggcaggctaacgcgcgactggagtgtcacgtcccgacgaacgcaaaacgatgcctttgcgttaaaaatgtatgagaacgcagcccttctggataagcccgtgattgatgttgttgccagcattgccgaaaagcacgcggtgccaagagctcatgttgcaattgcctggctgttatcaaaatccgtcatcacagcaccgatcattggcgcaacgaaaccagaacatctttccacggctatcagcgcgctggacttttcacttagcgatgccgaaatcacggaactggaagctcgctatctgccacaccccgttgacgggatcattcccccgcttccggatacgccgccttccctcacgccaccttcagcgatccagaactattaacaccctgccctggcccggcgttgccgggtctcccagaccactcattcccggtcactgatgtgaaaagggaaacggtgccggcgcgaatgcgcccgatcgaaaaatcatcgctccaccaggttcggtcccgctgttagcgacaataaacaactcgcgatgcccggggcggatcgccaggcttgtcgatttaaggttacggcctttgtcgcggtcaggcagcacaatttgcccaataggcagtccgttgcggttgaagaccatgacgcggccctggcctgagatggccacatatacattgccttcgctgtcgacacgggccccgtctggcgccggcccggtgaactgataggtaacaactgaaccaaacggggcgaccgtggtggcgtctgacagtcttacgcgatgaagcctgtttttagcgtgttctgtggcccatatctgagagccgacggggtcaatcgctatgccgttcccgaccgcgagtccaggcaggatggcatgaattgacccgacattgggactaacgtagaacaccccaccctgtggatcggctgaatttccccggctgtcagtgaaataaaatccgccctaattatcaaagaccaggtcgttgacaagaaatccggcatcaggagcaacaatcatctgctcacgggtgccgttgggttcgatagcccgaacagaacctcgctgcatatcgcccaccgaggcgataaagatccgtccatctttgtgtaccgccaggccggaagcaccgaatgaattctccttaaggacaatggaaagctgccgctccggggttagcttaaacacgcgccccgtcgccacatcaacaaacagcaggttattgttccgatcgaacacgatcccttcgagcacgagcgacgcctgtgaaacgttgaagtacggctgggcctccacggtctggagaggacgctcccagggcggtatggggacggcactgcatgtaagcgcgttatgatttagtccattcatgtggtttatccccggcaataatacagagggagacttcacctgcagtctccctgtgacagcaggtattaacttttatcaaactgactttcggtaaacggatcggcgcgaccgccctgcaatgggattttggcaagcgccgcatcgatttcgcgtagctctctgtccgtcaaccggacttgcggtgcgccgctgttttctatcaggtgcggatattgcgtcgtacccgggatagggacaatccagggccgctgggccattacccaggccagcgcgaactgaaccggagtggtgtttttgcgacgggcccacgactgcgcgaattcaagcagcaccatgtttttggccagggcatcgggctggaagcgtggcaggttatgccgccgatcggtgctgtcgaaccgctggcttggattgactgctccggcgaggaagctgcgggcagtcgggcagtaaggtacgaaaccgatacccagctcttcgagcgttggaaatattcgcgtctctggttcccgccaccacatggcatactcactctgcaccgcagtcacagggagtaccgcatgtgcgcggcgaattgtcctggcactcgcttccgacagtccccagtgtttcactttcccctccaggatcagcgccttcacggtttccgccacatcctcgatcggcacattcgggtcggggcgatgctgataaagaagatcgatgtggtccgttttcagacgctttagtgagccctctacggcacggcggatatggtcagggtggctgtttagggaagttggcttcccctcttccacgccgaaaccgaacttggtggcaatcactacacgatcgcgaacaggggccaatgcttccccgacaaattcttcactgagatgggggccgtagacctcggcagtatcaaagaacgtgataccttgttcgaaggctgcccggataagcgaaaccatggctttacgatcgcgcggacctccgccgtaataacccaccatcggcaggcacccgagtcccatgctggaaacctccagcgagccgagtttacgcgtggttaaggtttccttccggacgggagcagcatccgaaggggcgttcagcgtgtcctgaccagccggtttcgccatcacggcgccgctcctgccaagggtggttgcggccaacgccagaccggcgccggcgatcagaaaattgcgccggtcccgggaagcgggtgcggcagcagaaggctggtcatggatcatcttgctcataaactggaactccctataacgaagaaaggattcattaattggtcattaccaggcataagcctggggcgcttctcccccggggccgggccagatttcgtcgagacagctcatggtgtcgtctgatagcgtgactgtcgttgcgtgaagcgcctgctggagttgttcgaccgtacgaggcccaatcagtggagcggtaacgacaggattctgcaggagccaggccagggccacatcggaaggggtttcgccgaggtccttacataatccctcgtaggcttccagctgcggacgatactgttcgattagacgggcaaacgcgggcctggcacggcgcccgcttgccatctttttcagtacgccgccaagcagccctccggcaagcgggctccaggggatcaaccccaggccaaaatggcggcatgcgggaatgacctccagctcaatggtgcgggctgtcagattataaagactttgctcggcgaccaggcccaggaaatgacgggccgtggcgactgactgcgcagtcgcaatgtcccagcccgcgaaattgctgctaccgatataaagaacctttccctgctgaacaagcagttccatggcctgccagatctcttcccacggcgtatgacgatcgatgtgatgcatctgatagacgtcaatatggtcggtcttaagccgtcgcaaactgtcctcgcaggccttgcgaatatgatacgcagaaagccggcgatcgttcggacctggccccataggctgatagacttttgtcgccagaacgatgcgttcacggcggccaccctgctgaagccagcgaccaataatttcctcggacagccctgagccttgctggatatcgggagattgttcagtgccatacacgtctgctgtatcaatgaaattgatacccgcctcaagcgcctcatccagaatgcgggcgctggtcttctcgtcggtgacgtcaccaaaattcatggttccgagacaaaggcggctgactttcaggccggtgcggccaagatgcgtatagttcataaacggctccgttagatgagtgttccgccctggcctaccagccagagcgcatgattttcaagaataacgaagcacaacgtgtacagtgagtggacgtgcatgaatggacttgtgaaaaaaattcagcaacggattagccctaatcggtctaaggtgtatatcatttcttcatcaacgcattcgggttttaacgccgcataaggaaaacttttctgtatgcaaataagcagagctgatgttgccgatcttatttatttcatggcgattgcacgtcatcgcagcttcagccgtgcggcaattgaactaggcgtcagtgcatcagcgctgagtcatgccctgaaggggctggaaacccggcttggggttcgcctgcttaatcgcacgaccaagagcgtcacccctacggcagccggcgaggaactggttcagtctgttcttcagcctttcgacaccatagaaggcgcgcttgaatcgcttaaccggtatcgcaatacccctaccggacgtatccgcatcaatgcagccgttgaagcggcaaatcttttgcttgcgccggtcatgcccgcttttatggatcgctatcccgatattgaaatcgatattgtggccagcaaccgtatggttgacgtgactgatgcgggcttcgatgctggcatccgctatggtggcaccgtcccggaggacatggttgcccggcgtttatctgccgatattcgctgggttatcgcggcctcccctgattacctggaacgctacggaacgcctgaacatccggatgatttattacaccatcgctgcatcagcaatcgtctcggtgacgatcgggtttatcgctgggaacttgcgcgagacggcgaaacataccaaatgacagtgccaggctcagtgacggtcaatcatgccgaaacgggtctggtggccgtattgggcggggctggcctgatgtattttccggagcctcttgttgcaccctatgtcaaggatggacggctccgtctggtgcttacggaatggtccccactagaggaaggttttcatatctattattcaagccgccggcaattgccgaccgggcttcgccttctgattgagttcatacaggaggccaggccgctggggttgtgaaatagtgcctccatactgaacgatgcgttatcggctttatcgccccgtcgcttattcagaatgctcagttgcaggaagccgcagggagtctgcaaggcgtgctgtttgctaataatggagaaacaagaggtaacgctgtgaaaaattacaaaaaaacatgggttgtagtttattagaaggctagcccaggtgacccgcatcaataagcgccatacgaagatgtttctgaatgaaatccgctttataaatgctgtatcggtggctgtcattttcacataataacatcgcgctttttttcattaaagcgtactgaatggctacgtcattgtgtttaataaggtaatcacggaatgccaggtgttttatgatttgagcatccccggtggcaaacgcatggatatgatgactacgctgatttccaccttttgtaaagtacctacgatttaaaatgccgttttcaccacgcacagtatatcctacaccctccattgcctgattcaaactgtccagttcttcaagattagcaacttcgattaatatatctattactggcttagctgataatccaggcaccgaggtgctaccaatatgatgaatccgggatatcactttaccaagcgtcatctgcaacagagtacgttcgttctcaaataaagccggccacatctcatcataatcaactacagtcaatattcgcatgttcaacagtcacaccttttaaggaaatttaagcagtcacaataacataaatcgcctctgctgacttgaaggcatttataatctgtatctgtcctcatagttttcaaccatcgtctgacaagatgccctaaacccctttgtagtgctctttattcagaccatacttcttcattctgagataaagttttttacgcggtatcagcagatactccgccacctcattaatacgtccctggtggatattcagcgcttcggtgatgatctgccgttcgacgtcctcaacccgctgatccagcggcgtcggctcgccgatgtgcatcagcggattaaccgtttctgcaagtggtaatacccccactgcaaacagctcggcggcgttcgccagttcgcgaacgttatttggccacacccggcgcatcatccccttcaacagaccagcatccacctccgggacgggatgattcagccgttgacaggttttttgcaaatagtgatgaaacagcggctcgatatcatcaggtcgctttgacagaggctggcagccaatttgcgtcatcgcgaagcagtaatagagttccgccactatctggctgctggcggccaactccaccagcgaagcgctaccgataccaatcaggcgaaaaggccgcttctcatgactctgcagctgtaccagctgatgctgttgctcgtgagtcagatgctcggggtgacttaagaccagcgtcccgccctgggcctgggcgatcagttcattaagcgtatgggcgttagccggagtcagctcgcaggcgataaacggaccttcagcgtgccgtcctaactggtgcaggtaacgcgcgccggtcatgcggccggttcccggctcgccgtaaagccataccgcaatatccgtttctgccagctgctgaaggcgctggcgataccgaaccgtccattggctgcggccaataagctcaacctgtaatttttgctgacaatactggcgacgggcgataaccgattgcctctgacgcagcgcggcgtccaccagcgtgagcagcttgcccggatcgatcggcttttgcaggaaatcccaagccccttttttcaccgcctccaccgccatcggcacatcgccgtgaccggtgataagcagaatcggcagcagatcgtcatcctgatgaaacaacgtcattaaatcgataccggagcagccgggcatgcagacgtcgcttaaaacaatgcctggccagtctttcggcacctgctcccgcgcatcaaacggattattacaggcgctgacatgataccccgcttgctcaagcagctgcgtataggcatccagcacatcggcatcatcgtcaatcagcagaatcgaacagttattactcaacatcttttacatccgtcaaattgaattccagcaccacgcaggcactgcgtgtaaacgtcgacgccaggcgcaacgccccttccatttgcgtcatcagcgaaacacatatcgaaagccctattccgagccccacggttttactggtagtgaacggctttaacagcgaagggagtaaggccgcaggccagccagggccgttatcggcaatcaacacgcacagccttccgccctggatttgccagctcacggtgatttgcgcggcgtgcgggcaggcgtcgagggcattggacagcacgttcaccagcacctgatggacgcgcacttcgtccccctggatccagacagtgtcatccggtatcaccagcgtcccctgctgaggcttatgacgcatcgccagcagttcccacgccacggtaaacgtctgacgcaaatcgaccggatgcagcggcgtttccagttctgcgcggcgggtaaactggcgcagggagcggataatcgcgtcaatgcggttgatcagcccttctgctttgcttaacgtcgtccgcgcctgctccgcctgtccctgttcgatcgcccttcccgccgtaaaaagatacatcgacagcgcgttcagcggctgattaatctcatgcgccagggtggtcatcgtctgccccaccaccgccagtttagcggtctggatcagctcgtcctgcgtggcgcgcagatcggcctcaatcgcttttcgctcgccaatctcctgttccagctgctgtttttgcgcattaagctgacccagggtatgacgaagcaaaccggcaatacgtcccagctcgtcgcgcccgtaaaccggaatggtcgcctcggtccggcccagaccaatctgcaccaccgcctgattcagcgcggtaaagcgtttcaccagccgcgagcgaataaaataatggtttagcccccatgccagcagcagcgccagcaaggtcgccaccaggattaacccgccgctgacccggacaatctgcgccatacgctgattaaacatctgcatctgctggtgactgctgccaagctgggcttccagcagcgttctgaagcgccccagcgtcgcttctctggaccggctggcttccacgagcgctttttgcgcgctaacatagtcgcgcatggtatccggcatattatttttcaccatgccaatttccagcagctcatctatcgtttgtcgcagggtaatggtgctcggccagtcatccagcgcacggatattttcatccgccgtttttttcaggttttcaagatagcggatatgcgtctccaccagcatgccgtcatcattcccggatttcagttcattgagcctgtcgcgcaggtcgtcaacgatctgattttcaatacgagccagggtatagacctgctgctgttcattctgcacttcccgggcgcgtttcagatactgcctcgcatccccctgtcgggcttcaatctgatcgagcagcgttccctgttgccaggtaaaatcctgcaccagcgaattcagctcggtggtgaaatcatcgtgcagccagtcgatccgcgccgcaagctctcccaccttttcacgaaccagaaacatgttgtagagcacgcgatccagttccgccagcagcgcgcggctgtcctgcaatatcacccccaactgctggcgttctgccggcgacaacccctgacttagccgttctattttgtccagatgctggataatctggttgcgcagctgcagtcgtaccgtggtatttggcgccagcagaaattcattgagctgatcgaccaccaggttgagattcccttcaatcagaaaagccgcatggatgcgcggaaaatactcatccagcgaatagcggatctgcgaactttgttcatgccaggaatagaggcttacgctgctgacaatcagcgtaagcagcgcccccgtcagaaatgccccgcgcagactgctactgatactgatttgccgcaggcgttgcagcatggacctgtccgtcatttcagttcttccagtttagtaatcgcctgtcgctggttgttgagaaaccagagctgccactccatcatctgctgttccgcaaaacttttgttgtcgaactgagccagccaggcttcatcctcactgctggccggatccaccgggacacgggtgagcagcgcccgtatctcgggcagcggacgcttaagacggacctccgcgctatgcagcgctcgccaggcgtctttgagctgggcaagacgaaagctaatcgccgtatcaaacattcgctgaaccaaacgctgacgtttgaggatcaatcgatagtttaatggcggttgattcatcagcatcgcctgctgcgccgcccgtggattgcctggcgccagcggtgttaccggatacttcccggtattagcgtcggcgaggatcgtctggccctccggacttaacagatagcgaataaaccgccgcgcttcgctggcgtgctggctgtttttaagcactgcgacataggtcggcgaaaccgccgactgagggaaataggtaaaagccaggtgcggatcgttcagcagcagattggcgtaattatcaatcaccggaccagccacgcccaggccgcttttaatcttatctgccaccccaaagctgcgggatgaaatggtcacgagatttcccgccgtcgtcaacagcgtttcccatcctttaatccagcctttttgttgcagcagcgactccaccatcagatggttagtatccgaacgcgacggactgctcatcagcagcgccccctgataacggggatcggtcaggtcatcccagtccgctggcgcaggcagatgccgggtcatcagtgccaagcgattcatcagcaaaccgaacccggagatcgccacggccacggaggtggagcgaatggattccggcacaagatgttggcttactgccggcgcaccgctgaacggcgccagtttttgatgctcctgaagatgctgcagcagcatcggcgacgaagtcaggatcagatcgacattttcggcatttgccgtatcaagcaactgttccagcgaggcgctggtgcggttgagcgtccttatcatcaccgaccccgactcttgctgccagcgatcgataatccacacggtggcgctgggagaaaatgtcgtcgccatcaccagctcattgccttgcgccgcacagggtctcagccatgcgctcagcagcagcagcgcgaacattttgctcattatcccgaccccacgaagaaatatgtttgtgatcccgttcataaatattgaaataccgtaaaaaccgcgttgagacaaaacttacccgtttatgacatctggtgaattaatcgccgcgagcggaaaaatagtcaaacgggcgtccgggaatatcgggaaagattaccagataatgattaggcaatttgttagtgtccgcacaagccggacataaaatcagcgcaaaattaattacgcaaaatctcgctcatgccagatgggtcaaaaacaacccgtccctgcattattttgagtcaattttgactcatttcgacgatttgaattttttagccgcttatttcacccttcggggtaattactcctgatgttcatatcaatataaatacaggtgacgacatgttatcattattaaaaaaaggcccgtcggcgaataaagttcctgctgagaaaattcaggcaacctatggtcgataccgtatgcaggcgctgctaagcgtatttctgggatacctggcgtactatatcgtgcgcaataacttcaccttatccacgccctatctgaaagaacagttagacctcagcgccacgcagatcggtttgctcagcagctgtatgctcatcgcctacgggatcagtaaaggcgtaatgagcagcctcgcggataaagccagcccgaaagtctttatggcctgtggcctggtgctgtgcgccatcgtcaacgtcggattaggattcagtaccgcattctgggtcttcgctgcgctggttgtcctgaacggcctgtttcagggtatgggggtcggcccctcttttattacccatataatgcgcctacttatcagcctttgggacgttgggacggtatttttcactatatacccccaagtttttagacatgaaaaaagctcgatatattataaatatatcgagcctttaagttactgtttttcaatatcgttcaaaatcttgataattacagtatacggttttatgaagtggtatatttgcaaatgcttattttgcaaggtctatttgcttgatttatcctacaatcgtaatgcaaaacccatgaccggaagcaacgaacttaggttcaatctcactcaaatccgaggatagcttttgtccggattcttgattgggcaatgtatctgcgccgcttgattttaccgctgcgtcccaactgctttcgataacttgtccgtgattctcacccatgccgaacatgaggtcgctgctaaagaaaataccacgtttcttttcaaaaaataaaagtccttcccacatatgcatttcagatgggtaactgatagtttgaaattcaaaatcatctccggcaaatatttcattcggctttttaataagcacattgttagtaataccaaaccccatcagttgtcttgctgtggtttcggaacaaaccgcgacagcttcgggatgttctttgagaaccaaagcaagtccgccacattcgtctgattcaaaatgagaaattagaatgtattttattttgcgttcaccgagcaactcttgcaacttaggaatggtagtttgcgcttgtgatacggctccggtctgaatgagaacaggctcatttgtcatcaataagtattggtgcattgaaagcttaatcggctccattacctctgtaaattggtataaatctttgataatctctgtcattgtcaaaacgcctttttctatttatagtctaacctaaattccacgtgtgttttttattagcttcaaaaatcactatttcacgaagaatttagactgcttctcacacattgtaacattatttacaaccacctttcaatcatttttgataaatcattgatttcatctttgctgcaatgatacttaataaactctgcaagttatccacagagcaacactcaattttattgatgatattcttattataccagacatttttcatacactcccttgtacggatagttttccgacaacttcatgattacatatcttgcggttttgattatttttgctgcaagaaatacatacttcaaacgaaaggtctttatttgctgtctgtattctgaagagtccaaggaatcaaacttgaacaacaaaaataggttatatgaaagcatcatcatttgaaacacggcttcattcgcccaaaatgactttagcaagagatgacccaccgccatgtcgtatttggcttctttgatatagttttcagcattaccacgcttttcatagtatataactactttttcagaaagcaaggtagtatttgttacaaagaaaaagtagtcgtattcggaaccttctaaaagtgataattgtgctctttctttttctggtttcagtacgcgagatacgacaaatcttctgtctttttcccatttaactaattttgtatacagttctgtagtttctctaccttcttctcctttaacgaatacaattgatgaattcgttgcttgtgaggtgagtgtagaataacttttggctttaattaaatatttgcatccaagagattctatcgtttcgataattttttcatcaaagtagccactatccattcgaaataaaatttctaaatcgtctgatttgatgttagcaacaatttctttgatcatttccgcagcaccgtttgcagtgtaagtattgccacttcttacaaatccggtaacatatgcttttaattcgtcgcaaaatgcaaattggatattgtagcatcggtttcccagtttcttaggattatatccttttgacgcaccttcttgatgaccttctacgttaattacactactatcaatatcaatcgtaatggatgtcaatttacttttagtgagcagttttttaaagactttaaaattaatgtctctaaacatttgggttgtcttgaagttgaagtttcctagaaaccgtgacactgtttcaggttcttttacggaaatatcaaactcgttgacgaggggatcattttgaagtagctttagacgttctaacttatcaatgccaatgaagtgaccgcagagcatggtctttatatgattcatcttgattttatttgttgagtcattatcaaatacgaggtcattttcaataaaatcaaaaatcccattgctttttgcattctcaaggagcagaaaaagacctgcatttgatgttagattcttagctttgaaatcaattttattaatcataattagaacccctttttactacttttcttactattattttaccatatatcgagtcataaaagctgataatttaacatatttttgagcacttttctttcacccaatgggtgaaagctgaatttcgaaggaatgcatatttatcaaggctttgattatgctttttgaagtactgacgtagaatctaggtattactattgcgaactggttcccgcgccgtgagcgtggccgcgtaggggcgttctggaacatttcccataacgtcggcggcggaattgtcgccccgatcgtcggcgccgcattcgccattctcggcaccgagcactggcagagcgccagctacattgtaccggcctgcgtggcggtggtattcgccattagcgtactggtgctgggtaagggttcgccgcgcgaggaaggtctgccttcgctggcagagatgatgccggaagagaaagtggtgctgaagaccaaacacggccagaaagcgccggagaacatgagcgcatttcagatcttctgtacctacgtactgcgtaacaaaaacgcctggtatgtctcctttgtggatgtgtttgtctatatggtgcgtttcggcatgatcagctggctgccaatttacctgctgacggtgaaacatttttccaaagaacaaatgagcgtcgcattcctgttttttgagtgggcggcaattccgtctactctgctggccggctggctctccgacaagctgtttaaagggcgccggatgccgttagccataatctgtatgacgctaatcttcatctgtctgatcggctactggaaaagcgaatcgctactgatggtcacggtattcgcggcgattgtgggctgccttatttatgtcccgcagtttctggcctcggtccagaccatggaaatcgtccccagctttgccgtcggttcagctgtgggtctgcgcggatttatgagctatatctttggcgcatcgttaggcaccagcctgttcggcgtaatggtcgataaaatgggctggcacggcgggttctatctgctgatgggcgggatcgtctgctgcatactcttctgctacctctctcatcgcggcgcgctggaacttgagcaacagcgtaaaatcaccgagcaggaagaggcccgactggcactggctgacgcacagtaagcgcctgaacccgggggaacaaagagccagcttgctggctcttttgtcgttgatagaggaatagatgtccgcggcggcttccgacagcggtataaagcaagttttcctgccatcactgatgttgctgctgagtggcctacttcgccgggataatcagcacctgacccggatagattttgtcgggatgggtcagcatcggtttattggcttcaaaaatgcgttgatactcattggccgagccatacatcgcttttgagattgcgctcagagtgtcaccggatttgaccgtgtaaaaacgactttccgccccgctttgcgtcaccttaacgccgtcactgacctggcctacgccagtgacattcccgaccgcaaccagaattttttccttatcctcctgcgaagcgacatcaccagtgaccgttgcggtgccatcttccgcaacatcaatattgaccttttcggcgccaggcagattaagtccatcgatatgttttttcagcttttcagcccgatcttctttactgtcgccggagacggcatcccatattttctcgcccgcttctttcacaaaatttaataatcccatctttccatacctccacgactgttacatgaacacatgttcctcggccccgttgacccaatgttcgggatattggttttgatatccaccatcgcgacaactgcttgaggcagcacaagctgccatcaaagtataatcaatgagcgtcaaagtgcaggaaatttgccatggtatggcaggaaagtctgtattccggcaaggcgacacgaaactaaagcggacattatccccccgaacacaaggcacctggcgcagaggctgattgattgtgaaaggatttaaatggcaggctgggagttggcaccccgcctgagggctcctgattctggtcgccaatgctttcaggacgtttttcttactgagatcgtctcaaaaacattcgctgatttctgccgcagcagctacagtaaatccaggttgaactggtatgaccacacaaggcgagactcatggaacctgtcatcatccccgtaagccagggcggctttgtcgccgccacgctctggcaaagacacaaagccaaagcattggtgatcgttcacccggcgacggccgttgtacagggattttataaaggattcgctgaatacctttataaaagggggtttagtgtcattacttatgattaccggggcactggtctttcgaagtccgggagagtccgtcacaacaaaaacaccatgtccgactggatcgagcaggacgttggatgcatcaccgcgtgggcgaaagcccgagcccctggccttaccctgctggcgattgggcacagtattggcgggcatgccgtgctgttatcttccgcctccaccgacctgcgagccgccgtcatgattgcctcacacgcaggcgtgacaagcactatcagccaaacgaaggaaaagctgcgagtatggtgtttactgcgcgttttggggccggcactttgccggctctttgggtatatgccagccagacgtctcgggctgggtgaagatttaccggctccggcgatgcttcagtggggacgctggagcgcgatgcctgaatatttctatgacgacccggagtgggatgcgcgtcagcgggcaggaaagataaccttacctattctggtgttgggttttgatgacgacccttgggctaatacagaagccatctcacgcctgcttgctccagcgcaaaacgcaaaaatagaacgccgtgaaatacggcgggcggattacggactttcatccattggtcatatgggcttctttcgtacccggaatgcggagaaattatggcccctcgtcgcacaatggctggagagacattgcccggataagaggcggacgacctgagcaatatttcaggagacgccgcttccggcgcctcctgttcttcacctcgcggctactcctcgtacgccgcgtgatggaaatcaatttcccactgcagcacctcgccgtaaagcgccgataacgcctgcttttcgttttcgctcagcgccatggcgcagcggtcgagttcgttttttagccagagagcctgctgataaaattcgtcctcagcgtgcatttccacccagcgtcgtaaatcagcatcgctctgataatgttcgctcgcccgtcggcaccagaaatagtacatccattccgcaccgaacatcagggtcacaatctgctcatagctgccctcgtgggcggtccgcagcataccgtcgcgaaagcgccgtaccccgggcaaatcatccgggtactcagcgggatcgatctgccgcgctgacaacacctgttcaaaccacgcgatctgtatatcaaccagggcattcagcacgccaatcagccagcgctgctgttgaatacccggcgctttgctgaccccgagggcaaaaatcgcgattgccgtcgcgacaaagttgccctcaaacaccagatagcggttgaagacgactgtcggcagacgatcctgttcgatatcagtcacaaacgggtgctgctgcatcgcctgccacgccggttgatgttcgcgcagcaggcgttcgctaaacgcttccattatgcctcctccagcgcggcctgcgcgaccgacataaaatgtttcacccgggccagctcaacatcgttccaccagacgccatcgaccttcattgtactggccacaatgaccccctgagtccgcccgaggatctgcttcacgttagccggtgtcaccccggagcccaccaggagcggtagttccgtcgccgcgcggatctcgtcaatttccgccatcgtggcgctatcgcccgtacgctggccggtggcgatcaccgcgtcagcctcgaagaaatcgacatcgcgcgtcagttcctgaatcgaacgatcggcgacaatggcatggctaccgtgcttaacgtggctatcggcaaaaacgcgaatatgttcagcgcgcagcatactgcggtagcgcagcgccttagcggccgccccttctataaatccttcgttggcgatataggcgttggcccactggtttacgcggacgaaatcggcgcctcccgccagggcgatcgccattgccgggatcgccgcgttagccagaacgttaatgcccagcggcacagcaaaacgttcacgaactttctcggtaatgaccgccatcagcgcggaggtttcatggccgatatcctcaggtttagagaaaggaatatcgccatgattttcaataatcagaccatgaacaccgcctgaaatataattttcagcatcgcgaagcgcacgttcaacaatatccgagactgattttcctcgatattttggcgagccaggaaatgggtcgcaatgaataacaccaataacagccttgcttcgtgaaaaaatagcttgtattgcattcgttttttctgctgagatagcaaccatcttatccatcctgttaagggaacactatgcgtgtttacgttactggtaatattaccgtagatgaaacctggtccattccggatataccgaaaaaaggagcctccattcacggcgttaaagtgtcgcaggatatcggcggtaaaggcgcgaaccaggcgattatattatcccgctgcggaatagagacgcgtttaattgccgccacgggaaatgacagcaacggcgcgtggatccgccagcagataaaaaatgaaccactgatgctactacccgacggccatttcaatcaacatagcgatacctcgattattttaaatagcgctgatggcgacaacgccatcattaccactacggcggcggccgatacattcagcctggatgaaatgattccgcatatggcggatgccgtcgctggcgatattctgctacagcagggcaatttctccctcgataaaacgcgggcgctgttccagtacgccagaagccgcggcatgacgacggtattcaacccctcacctgtcaatcctgacttttgccatctgtggcccctcatcgacatcgcggtggtcaatgaatccgaggccgagctgctccagccatacggggtgaaaaccttagtgattacccagggcgccgcaggcgcctggctggtccaggagggccagcgtcagttttgtcccgccgtgcccgccgaggcgcttgatactaccggcgcgggcgacacgttcctcgccgtcatgttggcctccgccctgctgcgcggcgtcgcgccggatgcgctggcgctggcgcacgccagtcgcgctgccgccattacggttagccgccgggggacgctcagcgcgtttcccggcagccgtgagctcgccgccctgttaaccacggacggggcgcgctgacctacttaaacagcggacggtatgaatcgacgttcgctttggttaccaccgtcgccggaaccagaatggttttcggcacggttttacccgacgtgatgctgttcagcgcattcagggcttcggcgcccatcttttccgggtcctgctgcagtacggcggtgacgtagccgccgtcaataccggaaatcgccttcgccgtcagatcccagccaaagactttaatatccttctgccgcccctggttttctacggcggcgatagcgccgagcagcgcgggttcgccggtggcataaatcgctgtcagatccggattaccggtgatcaggttttccgccgcggtcatcgctttatcctgcacattctgcccgtcgaccacgttagcgatagtaatcttcggattgcttttcagcgtctcttcgaaccctttctgccgctggttctgaatggccgaattcagcgcgccgactatacccagtcgcgcctggccgcccatctctttctgcacgtagtccacgaagtattgaccgataattctgccgccttcaatattatcaacgccgacctgagctgcctgtggcccggccggtaatacggcatcaatcgcaatcaccggaatgtttgcggcggcggcttctttaaccgctggcatgatcccgttaacgtcgatagcagcaaccagaatgcctttaacgccttgctgaatatagttttctatcgcgtcgttttgcgccacgggattatcgttagagttaaaaataactaaatccttgccactggctttggccgcatcctgtgcgcctttattcatcagattaaagaacagcgcctgttggttgatttgtaccagcgcataagtcggaccggcagcgctggcggcagaaataaaactcatggatgccagcatggtcgtggcgacagcaaggaaacgcagttttccggtgtgaaataacatcatcagtatcctcgtcgggaatagttgatagccagcagagttccgcgccgcatgcgaacgcagaaggattattttttttggcgggcaaatatcgtctatatcgccagaacaatcattgaacgttcggcggatacctgcttaatgtcatcccggcaaccggtccgtgtcggtgcgcgactggaataacttaaacggggttgggaatgacttcccggataatgcggtaaactgcctatacaattctctgctgattaaaatttgtcaagcatttatttttggtgattgttcgcagagaaattgctgtatccaccgcgcttaactatgttacagatagccgattctggcacaaatggcgcaggaaatgagtataaaacgtgtattgttatccgatgtggcaaagctggccgggctgtcgaaggcgaccctgtcgcgctatatgaacaacagtattgtgctgccgcaggacaccatcgaccgcatcgaaaccgccattcgcgaactggactatcgcggcaatagcctggcacgccgtcttagcaaaggcggcagcgaaacgcttggcctggtgcttcccgatattaccaaccccttctttgccgaactggccgacgcagccgaagaggccgcttctgccagcggctacagcctggtgctgtgtatcacccgcaacaacccggaaaaagagtgccagttcattcgctggctggatacctgccaggtcgacggtctgctgttcaccaccaaccgccccgataatggcctgctgcgcaaggaagtccagcgtcacgaacggattgtcctgctggatgaagatattcccggcagtaaggtaccgaaagtgtttgccgataacgtccagggcgggcggatcgccaccgaaaaactgatcgccgccgggcatcgccatatcgctttcgtcggtggcccggacaagctgatgagcgtccgcgagcgctatcagggcttttgcaccgcgatggagcaagcgggcctgagctggccgcccgaatgggtgatgtatggcgactaccagcgcgagtttggccagcaagcgttgcggtacctgttcagccaacaggttcgccctaccgccgtcttcgctgccagcgactatctggtgctcggtctgctcgacggcttgcgcgccagtgggctccaggcgccagaggcgctatcgttagtcggcttcgatgacgccaactatgccgattttacccagccgcggatctccactatccgtcagcccgcccgcgaactgggccgcactgcggtgaacatcatgatgcgactgctaaacgacgatccggatatccctgcggaaacccgcctgccggttgaatggattggccgcgactcgatcaagatttgttaagcccgtcccaaaatggcgcaaaagcgcccgcttttggcgcaaaaaacgatcaattaacaatttattcactataatcagtaaaccggtttaccggattgtattcaattaagtgtattgaatacataaggttaagttacagggctgctgtgtggttactgccctggcacggatgctgcaatgttcttactggcgaacaaatatcttacatagcgtttgtcctgactgcactggcgagtgctctggtccgcaggtaaaccggtttactagattgtaaaccgtgtcggatagagtctctcccgcaggatggcgaacattttcccggccacagcgatgggagttatcagatgcagcagccacaaactaccccgccaagggtagagatgatcaatatcaccaagacctacgggtcgatacgctcattgcgcggagtcaaccttgagctggccccgggcgaagtgctgggcttagtgggcgataacggcgcggggaaatccaccttgaccaaagtgctctctggcgcggtgatcccctccagcggcacgattcgtatcgacggtgaacagcaacagtttacgaatccggccgattcacgccgttgccatatcgagatggtctaccaggatctgtcgctctgtgacacggtcgatgtcgcgggcaatctgtttatgggccgtgagccgatgaaatcggtcctcggcatcccctttctcgacgaggccaaaatgcacgccgatgccagagagatgcttaaagggctcgggatctccattccggatacccggctgctggtgcgaaatctctccggcggccagcgccaggctatagccatcgcccgcgccgcggcctttgacccgaaagtgctgattatggatgaacccaccgccgcgctggccgtcgcggaagttgaagcggttctggagctcattcgccgcgtttccgctcgcggggtgagcgtgattctgattacccaccgcctgcaggacctgttcctggtctgcgaccggatcatggtgatgtatgaaggtaccaacgtcgccgacagacgggtgtccgacaccagcctgagcgatatcgttaacctgattgtgggcgaaaaattcaccgcccgctctgcggcagcacattgaggtaacaggatgagtatcatgaatttaagcagctcacgcatgatccagcattcgctgccgcgccgcctgctgcataaccattcaggcgtagtcagcatcgcgctctttttcgtcttctgctgcgtggtgttttcgctgatcaccagcaactttctcaccggcaccaactggctcaacattatccgtcagagcgccccgctgctgatcgtcgcgacggcaatgactctggtcattaccaccggcggtatcgatctgtcggtaggctccaccctggcgctggtcggcgcgctctccgctatcgccctgaatagctggggtctgccgtggccggtggtactcctcggcggcctgctgctaggcggattcgttggcgccatcaacggcttctttattgcctatgaaggcattccggcgtttatcgtcacgctcgccaccctggccgtagttcgcggcatcgcgctgctggtcacccagggctactcgattccggtgccggctgacagcctgtttacctttatcggacgcgcgtgggtcgtcgggatccccatgcccgcactgctcggcattctgattctgctgatcgggcatatcgttctcaaccatatgcgctttggccgctacgtgaccgccatcggcgctaacgccgaaggcgcgcggcgcagcggcattaacaccaaagcggtcaccatgaaggtctatatcatcagcggaatggccgccgcgctggcggggatgatcattaccgcacgcctcggcagcggctcctccaaccagggcgaaggctttgaactgcaggtcattgctgccgttgtgctaggcagcaccagtctgtttggcggcttcggaactattattggcacgctgctgggcgcactgtcgattgcggtcattcagaacgggctgatcctgtcgcatatttcgccgttttacacccagatagccaccggcaccattatcctgctggctatctggctgaacacccgcattctcaacccgacgcgctccgcggcaaaaggatagctgatgaaaggatcaatttttcgccatccctccccgctgccggttggcgttagcagcggttatgtaatgactgtgcttggcccactgccgattaacgaaatgggcgttactctgatgcatgagcatattctgctggatgcctccggcaaatgggtgccgccctgctgctgcagcgatcgccatcttgccgaaatgccggtgaaaatggaaaaccttggcgaactgtcgctcaacccgctgatgagccgcgataactgtcagctgtttgatgtcgacgttgcgattgacgagctgactaaatatcgcgcccttggcggagaaacggtagtcgacccgaccaatatcggcattggccgcgatccgaaagcgctggcgcgcatcgcgcggctgaccggtctgaacatcattatgggtaccgggctctatctggaaccttcgcaccctgagtgggtaaaaatcagcagcgtcgaacagctgaccgaacggctgatttacgatcttggcggcgcggaggagaaaccggaggtgctcgccgggctcatcggcgaaatcggtatctccagccgctttacgccggatgaggagaaatccctgcgcgctgcgggtcgggccagcgccgcgaccggcgtgccgatcgaggtccatctgcccggctgggagcggctgggccatcgggtgctggatattctcgagcaggaaggcgccgatttacgccataccgtgctgtgccatatgaatcccagctttgccgataagcgctaccagcgcgaactggcgcagcgcggggcgtttctcgaatacgacatgattggcatgagctattactacgccgacgagtcggcgcagtcgccctccgacgaggagaacgcccgcgcgatccgcgagctgattgacgacggctacatccagcaaattctgctgtcgcaggacgtcttcctgaaaaccatgctcacccgctacggcggccacggttatggctacatactcaagcattttgttccccgtctgcggcgccacggcgtcagcggcgaacaacttgaaaccttaatgattggaaacccccagcgggtctttggcggataaaaggaaacgtcatcatgcagaaaaaaatcttactggtcggtgagtcctggaccagcacgtcaacgcacgttaaaggcttcgaccagtttgccaccgccacctggcacaccggcgcaacggactttctggccgcgctcgccgaaagtccctatgccattacctatatgcccgcccacgcggcggcgaccgactttccgctgacgctggaagcgctgcaggagtgggatgcgattattctctcggacattggcgccaatacgctgctgctgcatccggacacctggctgaagagccgccgaaccgccaaccgtttaacgctcctgcatgattacgtggccggcgggggggcgctgatgatgatcggcggctattacagcttccagggaatcaacggcggcgcgcgctaccgccataccgaggtggagaaagtgctgccggtacgctgcctggcctgggacgatcgcattgaaaccccggaaggctgctatgccgaagtgacggaggctcaccccctgtttaacgatattccgggcgaatggccgtggctgctgggctataacgaagttgaaatgcacccggaaggcaaactgctggcgaccgtggccggtaccggtcatccgctgttggctgttcgcgaatatcagcagggtcgctcgctggtgtggaccagcgacatgtcggcgcactggctgccggaagagtttgccaaatggcccggctatcgccagctgtggattaactgcctcgactggctgacggaacgccgctgatgaccgcgacccttgagctcgcccggcagctgctgggctttaacaccatcaacccgccgggcagcgaagccgactgcatgcggttcttcgccgactggcttgacgatagcggttttgaggtttcgctgtcgtcgttcggcgaaggacgctgcaatcttatcgccagcctgcccggggcgaagagcggtaaaccgctggcctttaccggacatctggataccgtcccgctgggaaatgcccgctggcagtacgatcctttcggctcgcagatggaagacgggcgtctttatggccgcggatccagcgatatgaaagcggcgatagcggcgtttgccgtcgcctgcgttcatcagcgggaagcgatcctcgccggacgcggcgcggtattgctgataaccggcggagaagagaccggctgcgacggcgcgcgggcgctgatcgcctccgcaacgttgccggaggtgggcgcgctgatcgtcggtgaacccaccgccaactatccggttatcggccataaaggcgcgctctggctacgctgcgaaacgcgggggaaaaccgcccacggcgcgatgccggagctggggatcaatgctatctatcttgcggcggatgcgttgggtaagattcagcatttttcgccaggcgcgccgcatccgctaatgaagcaacccaccctcaacgtcggacgcatagaaggcggactcaatattaattccgtaccggaccgcacgcgttttgatgtcgatatccgcagcgcgcccaatttacagcacgccactatccgggagcgcttgacgacgctgcttggcgaaagcgtcaccgtctccacgctggtcgacctgcccgccgtcctcagccgggaggatcatgcgtggattaagcaggtttatcaacgctgtcagccgctgcacgctgagccgattgcgccgcgcgtggtgccctactttaccgacgcctcgctgctgctgcctgcattgggcgatccgccctgtattattctcggccccggcgagccgtcgatggcgcatcaaaccgacgaatactgcctgctcagccgactggcggaggccgaacagctatacggtgacatcattcgcgactggatggcatcaccgcccgcgacgaaagtaaaaaatgagtgacactgtcactgaaagcgcgtgccatgcaattcagcgtttgaataatatcgcggaataacagaggataaccgcctcgtacacgacggtatcaccaccagcaaggaggcttagcatgtccgtgaaaaccaacgctgtgctcgtttgcaccctctctttactcctttccgcctgctcgggtcgtgcttctgcgccgggcagcgccgaagacgctaaaatatcggctgaagtggataagatacttcgcgattatcaaacgggttccgatacttcaccccaggccaatgcctcacgctatctggcacggatccaggcggctatcttcgctaacatagaccagccggcctcctggcaagggcaaaaatgctcggtgcgctttatgctgcagcgtgacgggacggtgcaggatccaacggtcgagagcggcgatcggccattctgcgcgcaggtgatgtccgcgctgaaaaaagccaacatcccgcccgcgccggacgaaaaaacctatcaaaccttcagtcatgtcgtgctggacgtgaagccctgagcttgcccgcagaaatggccccggccatcaccagggccatttcgaacaagataagctgacagccctgcttaacagacgctttttggcgatcagcgaggaatgattcaatagtaacaggctggcgcaagcctgttttttttccattcttcaggatcgtggccgggtatgaataccgcatgatatcgctcggtaagctgacgcagctttcgcacagactgagcgacatcagtagcagacgtcattagccccgggagcgccttctcatggtaatgatctaaggtataagccgcatcaatcgctagcgtaaaatttgtaccacccggtaagcggataagaaaagattgatggcccggtgaatgccctggggtgaaaatacattgtaacgtgccatcaccgtaaaggtcatagtgatcatcggacaacccgttcagaaatagccagttaagttggggacgatcgaaatcgcgtcggcaataggctcccgaagtaaaccagtcaggggcaaaggcatattcatactcttgcctctggacaacatgcgtagcatgggggaagcgaccaattgctcccgtatgatcagagtgcaaatgggacaggaccacatagcggatatcctcaggagcaatgccaatcctcttaagttgttccacgcaaccctgttcttctgacatcaccggtttaaactgctctacagcacttccccaataaccgctgggatctttcaatccttcgacagccagaccgccgtcaatcagcgtaaacccatccggatgggtcagtagaaaccaggggacagggatctcataatgctctcccacgccctgattcatccggatatgctgatatcgacaatgctgtgttcctgactggaacatgaaaagctttatctctggcatcattattttccaccaataaatcaattaaatagattgaaatttagcctgactcaggccttgagtctggatttttcatcatttcgcagtaaagcagtagatacctgtccccacttacatttatcggtaaagccaatataattggtgaatggatctcttctcagcaatgcgcatatttatcagggtggttgaacggggcagcatgtcggctgcagcccgcgatctcggtattggccagcccgccgtgagtgaaagaatagaaaaactggaagctcatcttgggacacgtttgcttaggcgcaacacgcgtaacatgtctctaacgcaaagcggtaacgtgttttatgagcgaagcaaaacggccgttcaggcggcagagcatgctctttctgtgaatgaggaaaatcaggggctgcaaggcaaaatccgtattgccgcgccctattccgccggagaaagcctgctgatgcctgcattgttgcagcttcagaacgagcatccggagctacaggtcgatgtcatttttaacgaccgcgtcatcaatcctgtcaccgagggggtcgatttatcgctgagattaggtgatgtctccgaaggtttttttgtcgcacgcccgcttggcaccgtgcgcagagtgttactcgcctctccggctctgctggcgaaaatgggtcatcctgacacgccggatgcgctgacagattatccatttgctgctgtttccggtgtattcgccagtaatcgcattcaattggtcgcttccgaagatcaactcattaatgttcccgtcaatattcaatttcagtccacgcactggcggagtgtcctctcctggttattagcgggacatgccattggtgttttgcaaagtccggtttgcagaaaagaaattgcagacggcgcgctcatccccctcttaagccactatccgatcccgccatttagtgcctggttgctccatccaccagctgggatgatgtcgtatgaaacgcgaatttgtgcttccctgctggagggctatatcagagatttgttgcttgagccggccggctgaataaaacagcgctgccctggcgcgctgaagatggcctcttgttaatgactcaatctctgatgcatgaaatcaataagcgctcttgtttttgccggcaagtaacgccgatctgaatacagagcgaacaattgcaagggggctgccgattgttcaaattcaatctcgattaaccgcccatcatcaatatagggttggcaggcttgtttcgacaggatggcaaaaccgacacctgagatggccgctcgccctgccatctctccgctgttgacccgataacgaccgttaaccttgatcgtctcgaatccgccctttttattcacaaactgccagggagcgcctttaagcgcattcaccgttgtaatacagggtaactcttcaaattgctgtattcgagaaggcgtgccataacgctggatgacggagggggccgcaacgatggtgcaagggatcgtcaccagatgacgggcgatgtagtcactgtcatccatcttaccacggctaacaatgacagctaaatccagatcatctcgcagggattcataacccgacaaatttgtgacgcaactcatctccagatccggatgctgacaggcgaaatcagcaacaacagagcccagcaatacaggaccgatttcattgggaatacagatacgtaatggccccttgaattgcatttgtcgcaacgttaattcggtttcagtttgctcaagtgcttccagtaatggcttcgcccgggtatagagtagatgcccagcctgtgtgagcttcatatgtcgggtactgcgctcaatgagctgaaggttcagtttgtcttctaactgagaaatgcaacggctcacatttgatgtcggcatttccagggctttcgatgccccgacaaaactgtctctttccaccacagcaatgaagattttcagcgtattaaagtcaagaactggccgcatcaactatcccacatatgataataatgagtgccatttttaccatctaatcgacaagtttgatagcagttaagctaggatatttttcatccacaggtcgcttgctatgccactggtcaccacaacatttaatcaaaagacgctcattcggattgctatggtaatcgcttttgtccagtttactaatgcgctggaatatatgatgttcagccctgtttttacatttatggctgcagatttcgctgttcccgtcaccttctcaggctatgtatccggtatgtacacatctggagccgtcctgtcgggaattatcgccttttactggattgatcgttgcaataagaagcattttttaatcgctaatatggtactgctagccatggcgacactgttgacgacattcactaccagttttcctcttcttcttacattgcgcttcttcgcaggactggttggcggtacgacaatggctgtggggatcactattttgataaaccacacaccggctgacttgcgcggaaaaatgttggcgacggtgattgcgtcattttcgatggtcagcatcgtggggatgcccgctgtactatttttgtgtactcattacggttggcatgtcgcgttgtggttaatttgtacactgtgttggttggcattgccactgatcgtctccatcatccctcaggatcccgtcactttcgacacgtccaacgcgctgcccctcgatgtagatactttactgtttgcttccggtaatgcgctggtacagtttagtccaatgctgatcattcctgtcctggcgccattaatgacgcagctgttgggggcttctcaaggtctgctgccctggttgttcttcggcgggggcctggcggggtatctgtctaccagaatgacaggcgcattaacctctcgtgtttctgctttgagtttggcgaccgggtcgaccctcgtttttatcctgagcttactgatacccgtgatgggctatccgcatccagcgctatttattacgttatttctcggcgcagcttacagtcgtctggtgtcatcgtcggcggtgacgattcagtttcctgataacaagcaacgagcgggattctcttcattacagacatccatgatgtatctgatgacaactgccgcatttttcctgtctgcttttttgttacccgaccatcgcatggcgctacaaaatatggatacgctgttggcggtatgtgcaattaccgcatcaggaaccccaattattgtcatcgttttgcaaaagaaactggctaaacgtacgttcgagcccgatcgtttcaccactgagtagtactccacgggttgctcattttttaaggcaaaaacaggggcatacgcccctgcgtgactaccgccgactcatggccagcttcgcggcaaacaacagaaacaggcagccggtcgttcgatccatccatttcactacggctggttttttcaggatgcctgcggcatagcgagtggcggtaatcagcgttaacgaccacagcgtaccaatcaatacatggatagcgaccaggagaaaagtccagctcacgggtgaatgcccggcggggataaactgaggtaaaaacgaaacgtagaaaacacccattttgggattaagcacattccccagcatcccacgcagaaaccagttactggtggtagtggattctgccggagtggtgttaaattgctggcgcgggcgcagaagcaactggatgcccagccagcaaaggtagcccgctccgcaccatttcaacaaggtataagccaactcagaaaccgccagcagcgcccctaagccaaaggccaccacggcgccccagataaagcatccgagatcaatgcctaacgcggcatgcaaggctttgcgtcccccttcagcagtcgccgtgcggagaataagagcagtatcaagacctggcgtcagggtaagcagtgtagcagcgagggtgtaagcaagaagtgaatcagtgacgagcatttcctgtctccgaaagagacaaggctactgaagggttcacatttttgcaacaagattatttcccctgatcttctgcttaccctgctccatttttcttcggggatgacagatgcaaagagtagcccatgactaagtaatgcttagtcatgggctgatgttcttacaggaagagcttaatgttgatttaaaataaccctgggatacgttagctcactttaatatcatccaggtcgatatcctcttcttcgtaatcattatcaacaatcacgtcgcgagggatatcttttttgatgacggcatagaccgtggcggtaacaacgatattcaccagcagggccatgatgcctgccatcggatgtgacatcgtagggatcatcaatactccaccaaaaggaaccgtcgcatccgcaccatagaccatggtgaccgccccgccgcacgcgccgccgatagccgccgccgcgataccgcgcacaatatcattcatgacgatcgggatagaaccctcaacgatattcacaatccccatcggaaccgccgattttaaggtttccacttcttcacggttatagatgttcttacgcagaagcttagcaatgaagaaagccaggccaaatccgataggcgtagcggtgttaactaactgaagtgcggtaatgggttcatttatcccctgcgcctgcagggtcagcacgaaagcaaagcatgtcttatttagcgggccgccaaagtcaacaatacacaatgcgcctatgactgcgcctaacaccaaattcgacgacgtgcccatgcttctcaggaaagacgtaagcgcttccgtaaagataccgataggcgtaccgatgatatagaccataatcaggcagctgataatggaggcaaaaaagggaacgatcagcgtcggcatcaacccgcgggcccagtcaggcaccttgacgtttttaatgatcgccagcgcaatataccccgcaatatagccaccaatcatcccaccgataaagcctgcgcttatggtattcgccgccagcccgacgacaaatcctggcgcgatgcctggtttgccggcaatcgagccagatattcccacggcaatcaccaccggcaacagcccaagcgccttggcgcccagggtggccatcgcctgccatacatcaaattgtcccggagttaacgtgtcctgcaccgttccgccaagccccatgccgatggcgataataaacccagaaccacagacaatggggatcagaaacgagatagcggtcagcagatgtcctttagggtttgctgcttgccatatttgttttagagacataagtcacgccctttaatgtagagtcgccaggccgaaataaaattatgaattgactagttcactgagtttttcaatcaacttattgggggatttgactgccgtttccgtcgcgactttaacgactttcttgccggcaaatctctcctcgcccgttactttgacatcggcagcaagcaggacaatatctgctgcggcaatctcatcagcggttaacgagttctcaatgccgatggttccttgcgtctcgattttaacgttatgtccggcttttttagccgcagtttcaattttcttttgcgcaatataggtatgtgcaatccccaccgtgcaggcggtaacgccgacaatattcataatgtttctccgttaattaatttaataaattactaatcgatattagcaagttggtattaagcatcggcgttttctgtttctgaattgaaaagcgcaatgattttatgtggatcagattcaacaagtaatttagcgataatgtcttcatccgccagtgacccagacacttgtgccaacaggcgaatatgggtggcattctgatccaccaggcaaaccgcaaataaaataacacagcggacatcgctgccatccatggtctcccagggaatggcatgttgcgtgcgtccgatggctaatgcggtacgggaaacaccggaagatttaccatgtggaatagcgatatggttttcaaagccggtagagcctagctcctcgcgtaaccagacatcacgaataaagtcttccttattggtgacggcgccatcctggataagtaaatcggtgagttcttctatcacctcttctttggttctggcggtcatatttaacttgatgtttttaacattaagcactgtcgaaatatccatgattcacccgcattcatatagagtggtcgttaaataacaaaccagcatcgctggcgtgatgcagatcttttaaggcttattcaaatacacactgtggttcgaagagaaataacccgttatgcagcgacagtttcccgttggaagatctcgatcattctgtcccacgcctggctgacatcctcatggagcgaaaacagacccgatgtgccgacgataaagacatctaccccggattcagcaatctgaccgaaggttttctcattgcaagagccatcaatttccgtcagatagttatagccattatttttgcgcatgttgatgagctttctaatcttgttcagcgactcaggaataaacttttgtccggcatagccagggtcaaccgacatgaccgtcactttatccagcagatgcgcatattcggcaatgctttctgccggtgtcgccgggttcagcaccaccccgcactttttgcccgcatccttgatctgattcagcaggcggaatattttgttattcgccgtctcgggatgaaagctgatgatatcggcgccggcctcgagacacatgggaatgatatcttccggatgattcaccatcagatgaacatcaatgggcacagtagtaatttttttcagattctcaataaaaaagggagacagtgtgatattgcggacgtaattgccatccattatatcaacatggtaaaaatccgcttttttattcattgccgtgatctgctctttgaactgcgttaaatccatgcacatcagtgacggtgaaaatttagcgctcataaaccacctccgataaatagttagttaaacattgcgatgatatgacccagcacgatgccgacaacgccaaagtctgcgtctccaaaggttgtggagcccagtcccatatcccccatcatgggcaagagaatggcaggcaggaacgaaatgagcagaccgtgagcaaaagcccctaccaccgccccgcgacgtccgccggtaatgttgccgtaaacccccgctgtggccccgcagaaaaagtggggaaccaggcccgggacgatgacgctcaagccgaacagcgggcagaggaacatactgaccagccctgcgacaaagcttgcgaggaagccgacgatgacggcattcggagcgaagggaaacaccgtcggacagtccagcgccggcttcgcgtctttaaccagtttgtccgcaatccctttaaacgccgggacgatctcggcaatcaccatccgaaccccggcgaggatgatataaactcctgcagcaaacgtgagggactgaataatggcgaagataataaagttctgaccagcgctcagggtctcctcgacaaaggatttgcccgcaacgagcaccagcaccagaaacagaatcatcatggtgagagagatggctaccgatgagtcgcgaaggaaattgagcgacttaggtactttgatctcttcaatcgagggactgcctttaccaataattttgcccaccagcgcggacagcaggtagccaatagatccaaaatgaccgagcgccagatcgtcggtgttggttattttacgggtaaacggctgcaagatagccggggagatgaccatcatcgcaccgagaataaccgccccgatggccaccacccatccccctgacaagccccctacagacaggataaccgccagcatcgcagccatataaagcgtatgatgtccggtcagaaagatgtactttaatggcgttagacgcgccagggcgatattgatcagcatgcccaataccataatggtggcggtttccgtgccgtaattcttctgcgccagagcggccatggcatcagtgttgggcaccacgccctgaatatggaaagaatgttcaaataactggctaaagatggttaacgtataggctataataccggcgccggcggtcaatatgacaaaacccatgatggttttcagcgtgcctgaaataacgtctgaaattccttttttttgcaacagcagaccgatcagtgaaaataaaccaaccagtatcgccggtgttcctagcacatcataaataagaaaatgaagcatgttaaactccacgaatcagatagccgttgcttaaatgttttctgctaaaatttctttaattttattgttatcaagtaaattacttaatccaacgacctttgcagagtgactgctaagatgttctgcaatgtctttggcgctgagaataagatcggcagtttcgctttttgccgacgtcaggtcggtatgtgcgacttcagcttctttattcatttcggcaaggatctttttgacattcatttcaacgatgaagctgctgcccaaaccattaccgcacacgataagcacttttttcattctgttttccttcagtcaataacggcctgaatcgccttgctatcatcggcattgaacaatcggtgtaacttttgctgatcgctaaagatttcagccagttcaccaatcatcgtgatatgttcatttccggaacgagcgcatagtatgattaccacgtataccggatcgttctctgtcgagccgaacgacaccccttctttaatatgaagaagcgataatccatttcttaataccccctgttcaggacgggcatgaggcatcgccaagccgggagctaatacgtaatagggcccaagttctttatggctttgcaaaatcgcctcaatatacgacccggctatatacccttgcatcagcaagggttctgctgcaagtcgaacggcattttcccagctatctattgagttaatgactttaattttatccggggttaaccagtctctgatcatatgctctcccgagggggtctatgtgctgcactataaacagctaaataaaatgcaactgtgatacacctcccaaagttagcgctaacaaagaaaaatgttaaaaaatgcgttaccgctaacactggctataatgtgctttccccctcgctgtggtaagttataatgcgattcgcagatatactttcgttatattttatttttcaaacggttggtgattttggtgaagagtttagacgcggacggtagcccgaaagaaaaacgacgtaaaggaacgggtaagataaccctgaccgaggtggctgagtttgtcggtgtgagcgccatgaccgtttcgcgagcgctgagaatgcctgaaaaagtgaatcctgagcttcgcgatcgcatcgatgcggccgtcagtcaactcggctatgtccctaatctgcaggcacgtaatctggcgtcggtccattccgatcttattctcgccgtcgtccccaccttctcttcaccgggttttttgccggtctctgaagcgctgcaaaaagtgctgaccgaacgcggatataccatgatgtttatggaatccgggcatgacggtcaaagtgaacaaaagacgtttgaaaaaatgctcgcctataacccggcggccattattcagttcaatatcgataccattgagagctgcacccagctgctggccaacgtggatgttcctattctggaaattggcgcgctaaatacccacccagtgggtatgtgcatcggcgtggattacggtaaggccgtaaaacagatcgtgactcatctggccgacgcctcattaaaaaacatcgcactgctctgtaccccggcaaataacacaatgtttcgccagttgctgagcggatggaatacggcgatgctcgctctgaaccgctccccgcaccgggtggtaaccacgcatttgccatccaccatcgccacaggcgtcaatatattcaaggatatgatgattacctggggcgatctggatgcgttaatttgcacgtcggatgaaatggcctgtggatgtatgatggcctgccacagtgccggcattaaggtgcccaataccgtagccattgcgagtttaggcggaggagtgttatcgactgtctgttcccctgccctgacaaccgttgagtttccctggcatgacattggggtgaaagccggtaaagcccttctcgaactgcttaacgataagcctggtgaaaagttcattgaaattccgtcagtgctcaaagtccgggccagtaccgcggcatgagtttaatatagggcgataaggcttcccctatctagtatctgtgtgtggtagccagggtttctaccaggaagaatgtctctctgcgagagtccatacaataaatgcccagctcataaagcaaaaaatagtcgggacagtagcgttttttcgctactaagcgggtaaaccgccagcctcatttcccgtttatcttgccagccgtcccaggcggtgatttcgtagcctcgacccgcctgggcggctttgcactgaagtccgtctagcgccagtccaggatatacgatgtctcctaagccagttagcaggtaaagcgcaccgcgataattcatttgcaccgccctggtgccgcacattcaccatgccgccccccgtcagacatgccctcattacattaaccacttgaatataaaaaattattttatatggcacgtttaatgctcttcgcttgtataccgcaatgtggacaagaacgtatgccatatggccacaacaggtcgccagtctgcggtcgcaaccttcccctttctgtgaggcatccagggtggatgcgtttcacggaagcctgcttactgaaaacggagaacaacatgacgacactcagcgaaccgttggttaccccgaaatatggcaaatggcgccagctggtgctgggcctgatctgtatggccgccatctccagtccgcaatatgtctggacgctgttgacaaaacccctgtccgccaaacttggcgtcggtctgccagaattgcaggtcaccttctcgctactgatcatcctgcagaccttcttttccccttttcaggggcggttagtggaaaaatttggcccacggcggctgatcgctattggcacggtgatggcgggaatgagctgggtactttccgcgcaggtgaatggcctggcaacgctctggctggtttatggctgcatgggcggcctcgggaccgggatcgtctacatcggcgttgtcggcctgatggtcaaatggttcccacagcagcggggatttgccgccggcgcggtggcggcgggctacgggatgggggccatcataaccaccttccccatctccctgtcgctgaccactaacggccttgaacacacgatgacgactttcgggatccttttcgccctcgtcggcttcatcgccagtcaggggctgaagctgccgccgcccgctgtctcccagcccgtcagtcagacggtggtgcagagcagcagatcgtttacttcccgggaaatgctgcgccagccgctgttctggctgatgttcgtcatgatggcgatgatgtcgacttccgggctgatggtcacttcgcagatggcggtgttcgccgaggatttcggcattagccaggcggtggtgtttggcatggcggcgctgccgctggcgttaacgatagaccgctttaccaacggcttaacccggccgctgtttgggtttatttccgaccgcttcggccgcgagcaaaccatgtttatcgcctttgcgctggagggggtggcgatgatgctctggctggcgtgccgggaagatccgctgctgtttgtcctgctctccggggtggtgttctttggctggggggagatcttctctctcttcccgtcgacactcaccgatacgttcggcagcgagcatgccgccaccaactatggctggctgtatatttcgcagggcatcgggtcaatcttcggtggcccgctggcggcactgctctatcagtacacccacggctggcatgtagtcttcagctgcgctattggccttgattttatcaccgccgccctcgcgctgtgggtgctaaaaccgtggcgcgcgcgctttatccgccagcatagctaatcgtccgccgggcagaagtgacggttcgcccgtcacttcactgatattcgctgcgcagcagcgcgtacagatactcatcgccccactcgcctttaaaaaagatattctgccggtaatgcgcctcgcgacgaaagcccagcccttccaggagtttgatcgcgccggtattgcgtgtgtctaccaccgctgtcagccggtgatgggctaactgttcaaagagtaaggccatcaccgcccgtatggcttcccgggcatacccctgatgctgatacgcaggggaaaaggtcatccccagctcggcttgtctgccgtgatctaagaagtggatccccacatctcccgccagcgcaccgttggcctggatctctacggcaagctggaaccagctctcatcctcagcaaaggcctgcgaacgctgttgttcatagaaggctgtcgcctctgtcatgccgtagtgggtccagctctggaagcgggccacctccggcagattgcgataatggctgaaagtcggcagatcttccgttctgaaccggcgcagcagcagccggggcgtggtcaggggtaacatcatctcttctcttcttctcaatgagacgggcaatggcggggccatcttaacctgcgcagcctcaacccagccatcgcacttccttgtcaatttaatataaagttaaatttcgatattaaaatttcacaaaccgataaaacattacaataacaaatacgaaaaacaggggaacaagccagagaggcgtctctggaaaaaagagcccttgcgccacggcgaagaggatggtcagtacagctgggccataagatgaaattaacgacttgaatattcttcgcagcaatcttttaataagattcatcatagttatcggatcatcctggtaatgatgtctgtaataccctcattcgatgcctgtcctgctgtaaccgtctcagacttcagaaataatgcctatcagaaagtacatcattcacagcttatgtgtataaaggtccgaataatacgtcggttcagaaacataaggacatgacttgtgtatgtctacgcaatcttgtttttattgagggaaccgacgccgcataaaccgcggctgatttactttttgcccgtctggcggcaagatccggcataatgcaccgctgtcgcaggacggccgtgtcaccggcaatcgtgacagcgaaccattcgacaggaaaacgcatgaagccaaaacaagcggacattctccgccacgccagcacgctgtttaatcgcgaaggatatcagtcgcccagcatcgagcggattgctgaacatgctggcatctccaaaatgaccttctaccgctattacgccgataaagaggcgctcattctggctatcctcaagcagaaagagagcgaatttatgcaggatttggcgcagatcaccgcggataaagccagcgcgcgggaaaagctgttcgccgtgttcgactactaccatcgctggtttacctgcgaaacgttccacggctgcatgtttacccgcgcgctgtttgaatatggcgcgtcatcgccggcgatccgggagcaatgctcccgatttaagtcgctcctctggcagttcttccgcgatatcctcctgcaggtgttaaaaccggaacctgccgagcgggtggccatgatgatggtgatgctcatcgatggcgccatcgccgcccagcaggccgagtccgccgaatgccgggagatcccgccaggggtgaccgcctggagcgcggccaaagcgcttatttactcagaaggcggtacgctgtgagatgataagctgccgcccagcgactgcagggccgccagcagaccatcatagtaatcgttgcaggtttgcagacgcagcgcggcgccaaagaagacctcctccatcgccgccggatgttttttgccaatcggcacaatcacattgttcagccagccatccgcatgaccgatgtcgaccgtgatatgttcggcatagtaatgcacgtcgcgctcggaaagcccaatccgccgacagcccgccaccagtttttcatactgcggcgggtcgagcagctcggtcatggccatcacgcccagtgatttgtagtaatgctgacggttaacgccgcccagcataaaggcgttatacccggccagcccctgccactcgtacaaatgggcaaaatgattgtccggcaaagcgatattccgccgcttcagtaaatccttgtacaaattgacgtgggtgatctcagtgctgccctggcctatctcatcccacagattttgcgcaatctcagcgcgggtttccggcagcgagcccaccagccccatcgccaccagatcgaagaaaagcagattgagggcgctgtcgcttttgaagaaatagtcgatttgcgccgcagaggcctcgctggcaaggaaatcgaacagcggatgatgagacgccgggtgctgctggcataaggcgcgcagttcgtcgacgatattgccggcgttaagcattggtctctggtggtggaagcgtttgcattccgcccgcagccactcagactcgatgtaatttctgatcccggaaagcagcggatgaaactgattggcagccgctggcgagagcgggtcggcaagccaggactgatagagaatgaacagcgcgtggtgcgcacgctttttggcctgtggatcgtcagcggagaaggcgcggatgcaggtattctcagtgagatgccaggctctgtcggccaccagcgggttggccgtcagcttcagcgacagcgcgttgctgtgcagaagctggtcaattaactcatccagcgccagcctggccatcaccgcggtctggtcgcttccaatcaccccattatctgtgttacgcatgatttatccctgtgaaatacatggctactatacggtatagtaccgtccataatgcggcaacgtaaatttcacacgtgctttcaatttactgattatcaaagaatttaaatgaatacaataaaaaccactaaaatattattgatattataaaaacaataacattaccattcagtacagtgacaaacgacacaaggaaccatcatgccttatctgttactgacgctggcggctctgttctggggcgggaattatgttgtcgggcacgtgctggtgcagggcgtggatccgatcctgatgaccgaagcgcgctgggcgctgacggcgctgctgctgggcctgctctaccgacggcaaatcgtcggcagtcgccacctgctgcgggcaaacgccccggcggtggtggtgctcaccctctgtggccaggtcagcttcccgcttacgctctatattggcctgcaaaccacctccgcgctcaacgccgccatctatatgtccgccacgccgagcatggtgctgttgattaaccggctgattttccgcgacccggtatcagggcgtaactggctcggagtggcttttagcaccctcggcgtgatgatcctcttatttcagggaaatccgctgcacgccgcctctctgcacacctttgccatcggcgacctgtgggcgatggggtcggcgctgagctgggcgctctactgttcgctgttacgtctgaaggaccgccgtatcccggcgaatggctttgtcgccgtcagctcgctgctcggcgccctgatcctgctgccaatcgtcatcttctggctgatgcgccacccggcgcaggactcggcagcctggcgcgagccgtttttcctcagcggcctggcgtatctggtaattttcccatcgtggctggcctatttgttctggaacaaaggtatcgccaccattggcgccacgcggggcgaaatttacacccacatcatccctctctccggcggggtgttgagcatcctcttcctgcatactcaaccgcaggcctggcatctgtttagcgcgctgtttatcatgctggggattgtcatttgctccctggaaaaacgccaggcggccgggcgcctgtcgacacccggtcacagaggttaacggctggtggagagcggctggtgatgtcccgctcctgcggattggatcacccggccttcgcgaccaaaaaaggtcaggacggtaatgacaatcgccaccgtcccggccaccagggccattgccaggccgtagttatgctcatgatgctgggcgattgatgcctggagagtggcattcaccgaagccagcaaattacccagctggtagacgaagccgggcagcaccgcccgggtgttggccgggaccagttcattgagccaggtggggatcaccccccaggccccctgaaccataaactgcatcaggaacgcccccgcccccagcgccagcgagccgctggcgaaagcccacagtggaatgaccggcagcgccagcagggcggcgatcataatcgctttgcgtcggccaatcttctccgacagcgaaccgaagaacactccaccaatgatcgaggcgatgttatagcagaccgcgatgatgctgaccgttttaggctcgaagccgtgctgaactttcaaaaagaccgggtaaagatcctgcgtcccgtgagagaagaagttgaaagccgccatcagcaccaccaggtacaggcacagcttccagtggctacgcagtaccggcagcagggccgtactctctttattctgcctggccgcctgccaaaccggagactcctcgacgcagaaatagataaacggcagcagcagcaccggcgcggcgccaatgacaaacatcccgcgccagccgagttgttcaaacagcagcccgtaggcgacggccgccagcaaatagccgaaggggtatcccgcctggaacaggccggacatcaggccgcgcgagcggtcggggatcgtctccatcgccagcgaagaggccacgccccagatcccgcccatcgccacgccgtacagcacccgcagcaggaaaaacagcatcaacgacggcgcggcggcggagagcagctcaaaagccgagaagaacacaatgttgagcatcaggattggtttgcgaccaaacttctccgccgccctgccgaaaattagcgcgccgacgggccgcacggccagagtcagcagaatcgccagggtgacctcctcaaggtcgacatgaaacgagtgggcgatatcgctcagtaaaaaaactaacaggaaaaagtcgaaagcatcgagcgtccagcttaaaaaactggctatcgccgcattacgctgtcgtgaggtccagccgtgcatcttgtcatccctatcccgacggcattgccgggagtgtgcgcggcgtccagcagagcgagctggggtcaccgcttgtgtaaattgtttgtatagaaagttgctcttttgttaattacaccccttttacgacaatcggcaagtttattagcatgctaatttgtttcaaattgcgtgttcccctcaccggttcggcaattttcgaccagaattaaaaccaggttcgcttaagcgaagcgtcatcaatgccgcatctgcccacaggaagggagagaatcatgaagagaattgccatcgtcggcgtggggccgacggggatttacaccttttatgaactggtgaagcgcggtgagccgctggccatcaccctgtttgaaaaagaggcgcaggccggggtgggtatgccctacagtgacgataataccgcggcgcagatgctggccaatattgccagcattgagatcccccccatcgacctgacctacctgcaatggctgcagcagcaaagcgatgactggctggcggcgcgcgggcttgaacggcacgccctgcatgagcgccagtttctgccgcgggtgatcctcggcgaatactatcgcgaccgttttctgtacctcgttgagcgggcccgggacgtcggctttgtgattagcgtttgtgaatcctgtgaagtcacggatattgcggttcagcccaccgggatcgccatccacaccgatagtgcagcagacccggtaattgtcgacctggtggcgattgccaccggccatctgtggcctgaagaagagcgcgccagccgacagtacttccccagcccgtggaccggcctgatggaggcccgcattgccccctgtcgggtggggatccttgggacttcattaagcgcgattgatgccgccgtggcggtagtggcccgccacggcgttttccataccgaggacgacaaaacgacccatttttccctccatccaggcagcgaagcgctggagatcaccctgatgtcacgccacggcgtgctgccggaggccgatttttactgcccgatcccgtgggagccgctggagattgccactcccgccgccctcgaagcggccattgcggagggtagcgacgctctgttagatcggatttttgagctgatcgttaaagagctggaatatgccgcccccgactggagcgaggcgatcgggcttcgtcagctgacgcctgacagtatcgccgacgcctggtttgccgaccgcctcacccatgacccctttcagtgggcgcagcgcaatctgcaggaggtggagcgcaataagcgcgaacaccacacggtgccctggcgctatgccattctgcgcctgcatgaggcgattgaaaccgtggtgccgcagttcaacgacgcggacagccgtcgcttccgccagggcctcgctcgggtatttatcgataactacgccgccattccgccggagtcgatacgtcggctgctggccttgcaccgggctggcattctgcggatcctgacgctgggcgaagattatgagctgcagcgggagcctgaccggacgctgattgttcatcatcgtcagcgctgcgaattcgatgtctttatcgatgcccgcggacaaaaagcgctgaaaacccgggatctgcccttcccttcactgcgccagcagctgctggcctgcggcgacgacattccggacgtcggtgatgactacacgctgcaggcgccggagacagtgcgcggccgggtcgccttcggcgcccttccctggctgatgcacgatcgcccctttgtgcaggggctgacggccagcgccgagattggcagcgctatggcccgcgccgtgtcgcagcaggccgccggccgacggcgccgtctctggtatatcgaatagcggagcgcttaagcgcaatatccgaatactgggggggtgaacaggcgtgctataaacagcaactgtccgtcccctgcacgaccacgtttaacatttacgaggtattcatgagtcatctttttagcgcgacgcgaattggtcaactcacccttgataaccgtatcgttatcgccccgatgtgtcagtactccgccgacgagggtaaggcgacctcctggcaccggatccatcttggccaactggctttctccggcgccggcctgttaattctggaagccacggcggtagagcctgcggggcgtatctccccgggggatctggggctgtgggatgatgaaaccgaaaacgccctgcgcggcgtagtcgaagatattcgggcctggtcgccgatccgtctggggatccagctgggtcatgccggacgcaaagcatcctgcgccgccccctggcagggaggccatcagctggcgctcaacgatggtggctggcagaccgtcgccccttccgccgtggcgtttcacgatggcgatcgcgcccccgctgaactgagccatgccgatatggcgcgcatcaaagcggccttcgtcgccagcgcgctgcgcgcccagcggctgggctttgagctgattgaactgcacgccgcccacggctatctgctgcaccagtttctctcgccgctcagcaaccagcgccgcgacgagtacggcggttcgctggagaatcgaatgcgctatccgctggaagtctttaaggcgatccgcgaggcagtgggcaacaccatggcggtgggcgtcaggctgtcggctaccgactgggtcgaaggcggctgggactgcgagcagtccattaagtttagccagcagctggaaacgctgggcagtgactatattcacgtctccagcggcggtttgtcgccgcagcaggcgatcgccgttgggccgggataccagttgcctttcgcccgcgacattcgccagcaggtagccatcccggtgattggcgtggggctgatcaccgacccgcagcaggcggaagcggcgctggagaatggcgatgccgacctgatcgccctcgcccgcgcggtactctacgatccgcactggccgtggcacgcagcggccagccttggcgcccaggtccgtgtgccgtcgcagtatttgcgctcggagccgcacggcctgaaaggcaccctgctgccaaaccgttgaacccacggcgggcataaaaaaggggtatcgtaagatacccctgagcaggatgttattgcggtccatgtgccgggcggcggcgacgccttgcccggcctacaaaagggcgatacccggtaattgcgcagccaacccgccccctgcgtaggccgcgcaagcgcagcgccgccgggcaatctatcaggctccgctccctatatttccgggcggcgggtcagacaaacaccgcgagttactgctgtgcggcaggcggtgcggcgttctgtttatccttcgcgatactgtcctggatggctttggttttgctcgccgcttcagccgagagctgattggcgtcaccgatggcgttgtctttgatctgacccgcctctttgactatacggtcactttcctgctttgcgttctgcttcaccgcatcggcctgggctttcgcctgctgggcgatggcgtccgccttcttgtccgcctcggccttgatggcgctggcctgatccttcaggcgatcggcctcggcgtcagcctggcttttcagcgtatcgatttgcttatccgcatcctgtttaattgcctgcgctttatccgccgcggcatccttcatctgctccgcattatctttagccttatccagtttgttatcaactttcgacgcatcgtcgcagccaaacagggtcaggcacagggcggaagcgagtagtgttttattccagagtttcatcagcattcccttacaggttaagtcgttatccagctttgtgattcgttgcattaatagcattcacattttatatataaacgctcagccgatagagtcaaggcgacagcgccgattgtcagtccagggtcgctaccagcccctgcagccagtcggcaaagacccgaaccttatgcgagagatgccggtgcggatagagcagcgacaacggtcgacgcggcgccggaaagtccggcaaaacttccaccagttgcccgctgtcgatataaggttgcaaaaagaaacgcatcccctgcagcatccccagccccgccagcccggcagcagtaaagacttcagagttgtccagcaccagtttaccgggaatggcgatctgcctgatgccctccggggtctggaatcgccagggcataatctgccggctgctgctgttcacccagttcaccgccagatgcgactgcaggtcctccagcgtcgcgggcgccccatagcgcgccagatagcccggactggcgcaggtggttaacgccacctcccccagtgaacgcgccacatagtcgccatcctcaagatcccccacccgcagcaggcaatccagaccatcgcgcagcatatcccggcgtacgtcggagctgctgaggacaatctccacctccggatgggcctgataaaaatccggcagatgcgggatcaccagcagccgggcaaaggcgatcggcatatcaacgcgcagctgaccgcggatcggccggtccggcgcgaacgactccagcagatcgtcggcctgggagagcaacggtttgctgcgacgataaaactcttccccctccggcgtaagatacagacgccgggtggtgcgctgcagcagccggaccccgctctcctgctccagctgctgcagtgctttggtcaccgccggtcggtggatctgcaaattttccgccgcctgggcaaagctgccggcatcgacgatttcaataaaaattttaatattttcaaacagattcatttgcatgatgacccgcctcccacctcttcatcagttcacattattactaatttaataacagtgatgaaagtttttgctcattttttaaaacaataaagacgcctacactgccctcattgccgcatcgctggggcgaacaaatttataacttattaacatacaaggaaaaatagcatgcaacctaaccgcgtcgcccgcattctgggtattgaaaaaccggtggtccaggggcccctctcctggctaaccgatgctcgtctggtggcggccgtcggcaacgccggtgggcttggcgtgctgggcccgaacgccggactgacggcggcaaccgccgtctccaccccggaggccaccgccgagaaaatgcgcgaagagatccgcaaaaccaaacagctgacggagaaaccctttggcgtcaacctgatcccgacggcggaaaatgacatctggacgccggcgatcctcccggtgatcaaagaggaaggggttaaggtggtggtctacaccggctacggcgacggttcgttaaaaccggcgctgttcgacgaactgaaagccgccgggatcaccattatctatcgtgacatcaacccgacgccggagaacagccgccgcgcggagcaggccggagcggatattattgtcgccaccggctttgacgaaggcggcacgctgccgggtaccgccctcgggaccttcaccatcgtcccgctgatcgtcgacgcggtacagcgggttccggtgatggccgccggagggatcaccgacgcccggggcgcgcgcgccgttcatgccctgggggcggagggcgtcttcgccggttcggtatttatcagcaccatcgaaagccgggttcccgactcggtgaaagcgaaaattgtggccgccaacggtctggatctgcgcctgttccgtaccctgccggactactaccgcgcgctgcccggcaaactgagcgacacactggtagccatggaccgggccggcgcctcaaaagccgagctggcccaggcgatgggcgggctgcgcgggatgcggctgggcatgctggaggggaatactgatgagggatatatctcggtgggcgcggggatcggcaacatccatgccatcacctccgtcgccgaggtggtcaatcagctggcggtatgaagccgccagccggggcacggtaaccgccgcgatcaggcgtcagccaccttctctaccgcccgggagaacgcgtcgatagccagcccgacgtcggcggcggtgaccgactccgccgggtgatggctgacgccccccaggcaacgcacaaacagcatggccgatggccagcgctcggcgatggcgatggcgtcatgccctgcgccgctcggcagcgtcagcgaacggccctgcaccgccaccaccgcctcgctcagcaccgcctgcaggtgactgtcgcaggcggtggcggcgatgcgataatactcctcggcggcgaaactcagctggcggcgcccggcaatggcctgcgcctgccccagcagttcctccagcagcgccgtcagcggcgcatcctgcgggccgcgaatatccagcgtcagctgcacctcgcccggtatcacgtttaccgcgcccggcgcacagcgcagggtgccgaccgtcgccaccaggttaccgccgtgctgccgggtcaggttttccacctgcatcatccattccgccgccgcggcgagggcgtccttgcgatgaagcatcggcaccgtgccggcatggccagcttcgccggtaaagcggcagttcagccgtctggcgccattaatcgcctccaccacgccgagcgccagccccgcctgctccaggcacggcccctgctcgatatgcagttccagataggcggcgatatcccgcgggtgacgggccgcgtgggcgatccgcgccggatcgagtccggcattcaccagcgcctgggcgacgctcaccccgtcggaatcgcactgtgacagccagctttcaggccaggtgccggtgacgccgcgactgccgagcagggtgatgccaaagcgggtgccctcttcatcgccaaagccgacgatctcgattgccttcgccagccgtcgcccctgctggtgcagacgctggaccacctcaatcgccgccagcacgccgagcatgccgtcgtagcgtccggcgttgcgcacggtgtcaagatgagagcccagcagcaccgccggcgccccctcctgttgtccttcataacgtccgcagatgttgccgacgctgtcctgccacaccatcatgccggcagcctgcatccactgccccaccagctggttggcctgcagatgctcgggcgacagatagacccgggtcagggcatcggcggtttcgctgagggcggccagccgatcggcacgcgccatcacccggctggcggccgcctctctctccgcctgctggcggacggtgtcactcatagggtggcctcggtgcggtagtgatcccaggccgcctgcatcgccgcgccctgggtggtggtgaacctgaggtagttcaggaccgcttccagcgcgctgagcgtctgcatcacgcagtctttacgcgcgttatagcccatggtgccaatgcgccagactttaccgtgcagcggaccaaacgaggtgccaatttcaatgccgaaatcttccagcatcagtttgcgtacctgatcgccgttgaccccgttggggatcaccacccccagcacgttattcattttgtgccgcaggtcgccaaaggtctcgagccccatcgcctggatgcccttcagcagcgcatcgccgtgcagtttgtggcgggcgatgccgttgtcgagtccctcctggaggatcaggcgcgcgcactcccgggcggcgaacagcgccgaggtcgcttcggtatggtggttaaggcgctccggcccccagtaatccatcaccatgccgagatcgaaatagttggagtagatcatctcgtcgacgccatcgtgatgggcatcggtgcggatcccctgctcaatgcagcggcggcggcggatgacctcttccatccgcgggctgagggtgatgggcgaggtgccggaaggaccgcccaggcacttctgcatcccggcggacacggcgtccagctgccaggcgtcggtttccagcgggttaccgccgagcgacgcggtggcgtcggtatagaacagcacatcgtgacgacggcaaatctctcccagctccgccagcggctgcagcatggtggtggaggtatcgccctgcacggtgagcagcaggcgcggccgcacgcgcttgatcgcatcctcaacctgatccggcgtaaagacctcaccccacggcacctcgatggtgtgcacctctgcccggcagcgacgcgcgatctcgcacagcagatgaccaaaccggccgaacaccggcaccagcaccttgtcaccgggacggatcgccgacagcagaatcgcttcgatcccggcgcgcgaggtgccgtcgaccaacatcgtccagcgattttcggtgcgaaacacgccgcggtagagcgccatgacttcattcatgtagtgggtcatcgccggatcgtactggccaaccagctggctcgacatggcgcgcagcacgcgcgggtcggcattgatcggccccggccccatcagcaggcgctgcggcgggttaatttgcgaaaactgagtgatatccatctgccattccttacgttagttaagaccgcgcaccgaggagataaactgtttcagttcgctggtctgcgggctggcgaacagcgttttgctgtcgccctgctcccagacgcgtccctgatgcataaacaccacgcggtcgcccacttcgcgggcaaaattcatttcatgggtgacgaggatcagcgtcataccttccgccgccagttgctccagcaccttcagcacttcacccaccagttccgggtcgagcgccgaggtgatttcgtcacagagtaaaactttcggcgacatggccagcgcccgggcaatggccacgcgctgctgttggccgccggagagattggccggatagtaatccagacggtcgccaagaccgaccttctccagcatccgctgcgccagctcccggcattcggcctgggacttcttcagtacccgccgcggagccagcatgacgttctccagcgccgtcatgtgcgggaacaggttaaagttctggaacaccatgccgatggagcggctgatctcccgggcctgggaatcgcggttggtgatggtcatgcccccgagcttgatgcttccctcctggtagccctccagaccattgatacagcgcagcagggtgcttttacccgagccgctgcggccgatgatcgagatcacttcccccatgtcgatatccagatcgacgcccttcaacacatggttgtcgccgtagtacttctgcatctgattaatggtgatgagaggcattgaatttgttctccagatagcggctgtagcgggacagcggatagcacagaatgaaatagcccagcgccacaagggcaaacactttaaacggctgataagtgacgttggtcagcatcgtcccggccttggtcagctccacaaagccgataatcgatgccagcgccgtgcctttgatcacctgtacggcaaagcccaccgtcggcgcgatggcaatgcgcagcgcttgcggcgccaccacccggtacagggtctggccgaagctcagcccgagacagcgcgaggcttcccactggcctttcggcagcgcgcgaatgctgccgaaccagatatccagcagaaaggcgctggtgtagagcgtcagggcgaccgaggcggcggtccacgccgagacgtcaacgccgaacagcgccacgccaaagaatgccagaaacagctgcatcagcagcggcgtgccctggaacagctcaatatacccgcggatcagccgtttcacctggcgtccgccggtgaggcgcagcagcagtaacggtaaggtcaccagcgccccgccggtgaacgcgaccagcgacagcagcaccgtccagcgaccggccagcagcaggttgcggataatgtcccagtcagtaaaagtggtcatcaggcctgtacccccagccatttacgccccgccgccatcagcagctggcgcatcgctatcgataacgctaagtagatcccggtggttaccagatagacctcaaagctcaaaaatgtccgcgactggatcaggttggcggcgaaggtcagctcctcataggagacctgcgacaccactgacgagccgagcatcacaatgatgcactggctgaccagcgccggataaatccgctgcagcgccgggggcagtacgacgcgaacgaaggtttgcgtccggctaagcccgagcacgcgaccggcttcccactggcccttcggcgtcacctgaatgccggcgcggacgatctcggtgctgtaggcgccgaggttaacaaccatcgccagcagcgccgcttcaccggcggtcatcttcagtcccaggttcggtaaaccaaagacgataaaaaagagctgcaccacaaacggcgtattacggatgatttccacatatccgccccatacccggctgagcattcccgggcgaccgctgcggatcgccgccccaaggatgccgatcgccagtccgccgatcgtcgccagcaccgtcaactgcaccgtcacccacaggccggccagcagctccggccagtgcggccagagctcagagaaatgaagttgctccgtcatccccagaccttacgcgccgaggctggcaggcagtggcgctttcagccacttctcagacagaccgttgagggtgccgtccttaatgccctgctcgatgagggtatccacttttgccttcagcgccggttcgttctttttcagaccgataaagcacggcgagtccttcagcataaagctcgggaccggcgctttgtcggcgttctgccgggagatagccgccaccaccaggtttccggtggcgacatactgcacctgaccggacaggtaagccgacagcgtagtgttattgtcctcgtagcgcttaatctgcgccgcctgcggcgccacgctggtcagcaccatatcttccaccgccccacgggtcacgccgatgcttttgccgctcagcgcggccgcgtccttcagctccgcccctttcgggccaaacaccccgaggaagaacggggcgtaggcgcggctgaagtcgatcaccttctcgcgctcggcgttcttgccgaggctggagatcaccaggtccaccttatcggtctgcagatacggcacgcggttggcgctggtcaccgggaccagctgcagcttgagcttcatcgatttcgccagatagcgcgccatatcgatgtcatacccctgcggctgcaggtcggtacccaccgagccgaacggtggaaagtcctggggtacggcaatgcggatgacgccgcgtttttcaatatcctggagctggtcagcctgcgcggcagaaacagacgataggagacaagcggccccggccagcgcgatcaacagtttcttcatgatgtttacccgttacgttagcatgaaacaaaagattctttgaatctgtttttgcaactaatgtgccagatacggacgaggcgagggttggcgaggaattaaaacaaaaagtgagaaaggacaagcgttaacggaaaagtgttcagagagcggcggcgccatcacgtggtttttattgcaccataataatgcacagcaccacgctggcgccccatcagcgttgttccagctcgtccagctgctggtaaagcgtggcgatatcgtggatgcgcggacgaccgctgtcgagcgtttcatggagaaaggcattagccagcagattaatcaggctgttgaccgaggcatagctatcgtaggcggagacgctgtccagcggcgcgcagagctgccagcgggagagcggaaacaggctgtgggcctgcggctcgcacattaacaggaccggcaccccgtcgcgctgcagctgctgcagcagcgggcgtactattcgcggccggcggcgaaacgccatcattaccaccagatcatcggcggtcagatcgaccagctcttcgctgagactctgacccggctggggcagcaccagcacctggccgcgggcctgcagcagctgctggcgtagatgcagcgccgccggataggcgttgcgcatgccaatcaccacaatgcggcgggcggccaccatcgccgtcagcgcctcagcgaactggcgggcgtcgagggcgttgacccactgggtgaggtttgccatctcctgcttataatggcgcgccagcagcgtgttaccctgcaccgcgtcgcgctggtcggtgagcggcatcccgctctgacgcagagtgcgcagttcatcgcgcatatccttatatttgtcgtaaccgaggcgcttgaacagccggctgacggtggctttcgacacgccgctcagctgcgccagctcggcgctgttgtagcttatcaggtcgtcaaagtggtcaaagatgaaatccgccacccgctgctcctgcggcgacagcgaggcgtattgccctttcagtcgttcatcgagttgttgcatagcgcccctgtaactttcgtttcatcatccattcctcatcatactgtatctgctatgccttacacatagcgtgccagtgggaaaattctggtcatcgtttttatcaatgaaacgaaacgttcagagatggaacagcttttgcagtgttctgcgggtgattcgttcagaaaggataatttatgcacagtagcaacgtttcgacccacggcatggcggtggccccccaccacctcgccagtcagagcgcgctggcgatcctgcgcgagggcggcagcgccattgaagcgatggtggctgccgcggcggccatcgccgtcgtctatccccatatgaatggcctcggcggcgatggcttctggctgatcgtgccgcctgagggagacccaatcgccattgacgccagcggggccgccggatcgctggcgaccctcgaggcctacgccggacagcggcatattccccaccggggagctcaggccgcgctgaccgtcgccggcaccgtcagcggctgggacgaggcgctgcgtatttcacgggacttaaccggccgcgcgctgccggtggcccgcctgctggccgatgcgatcggctatgccgaagacggcattccggtcactgcctcgcaggcccacgccaccgccagcaaactggaagagctgcgccatcagccgggcttcagcgaaacctggctggtcgcgggcgaggccccgcggcccggcagccgcttccgccagcccgccctcgccggtaccctgcgcatgctggccagcgacggtctcgacagcttttatcgcgggccgctggccgagcgtctggcgcagggtatggccgcgctggggatgcctgtcaccctccgcgacctgcaggcccaccgcgcccggcgtccggcgccgctgacgctccagcaccagcagggcacgctgtggaatcttgcgccgccgacgcagggactggtgtcgctggcgatccttggcatcaccgaccgcctgaacatggccgatgccgacgacgcgcaaacggtgcaccgtattgtcgaagccaccaagcgggcatttgccctgcgcgatgcgcatatcaccgatccacgccatctggatgtggatgtacagcagttgctcaccccggaagccctgcagccgctggccgacagcatcgacgacgccagcgcttccccctggggccgcggcaaaggcccgggcgataccgtctggatgggcgtcgtggataacagcggactggcagtgtcatttattcagagtatttatcacgagttcggcagcggcgtggtgctcccggacaccgggatcgtctggcaaaaccgcggggcggccttcagcctcgatccgcagcatctcctggcgctggcccctggcaaacagccattccacaccctcaaccctgccgccgcgcgcctgaacgatggccgggtgatggtctatggctcgatgggcggcgacggtcagccgcaaacgcaggcggcgctgtttacccgctatatcctgcagggggtgccgttgcaggagagcatctcccgtccgcgctggctgctgggccgcacctggggccagtcctccgactcactgaagctggagggacgctttgcccccgcctgtatcgctcgcctgcgcgagctggggcatgacgtagaagtgctggccgatttcagcgaagcgatgggccacgccggggccattgtccgccatcccaacggtctgcttgaaggggcgaccgatccacgcagcaacggcgccgccgccgggtactaaggagcagaccatgaccacacagccagactggagcgagtatctgacgcagatgactcacctgttggatatggagctggatgcgccgcgccgtaaggagctggagcgccagtttgcccgcatcgccgccatggcgcagccgctgatggactatcccctcgggccgcgcgaggagattgcgggggtgtataaagcatgactcttcaacacttcaccattgccgatctccagcgtgcgctgcacgatggcgaactgagcgcccgggagatcgcccgccagacgctggacgatatcgcccgcgtgaatccgcagatcaacgcctggaccgaggtcaccgcccagcgcatgctggcggaggccgacagcatcgacgccctgcgccgggaaaagcgccccctgccgccgctggcaggcattccttacgcagtgaaaaatctgtttgatgtcgccgggcacaccaccctcgccggcgccgaactgctgagcgatcggccgccggcagccagcgacagctgggcggtgcgccagctgcacagcgccggcgccctgctcagcgggatgctcaatatggacgcctacgcctacggcttcaccaccgaaaacagctactatggcgcgacgcgcaacccgcacgatctgtcgcggatcgccggcggttcttccggcggttcggccgcggcggtggcggccgggctggttcatttcagcctcggcagcgacaccaacggctcgatccgcgtccccgcgtcgctgtgcgggatctttggcctgaaacccactttcgggcgcctgtcgcgctccggcagccatccgtttgtcgccagtctggatcatattggtccttttgcccgccgggtggccgacctcgccgcggtgtatgacgccctgcaggggcgcgacccggccgatgactttcaggctgataaagccagcgagcgcaccggcaatctgctggaacgcggactggaggggctgcgctgcgcgcggctgggcggctatttcaccacctggtgcgatgacgacgcccgggcggccgtggatcgggtcgcccacgcgctgggcgccgacagcgagctgcagttcgcggatgccgcgctggcccgctcggcggcctttatcatcagcgccagcgaaggcggcaatcagtacctgacggatcttcgccactcgcccgagcgctttgaaccccactcccgcgagcggctgctggccggcgcgatgatcccctccgcgtggtatctgcaggctcagcgttttcgccgtcatgctcgccaggcaatgaaatccctgttcagccaggccgacgtgctgatcgccccggccaccccatgcagcgccacgccaataggcgcggaggagatggtgattaacggccagccgctgccggtgcgcgccagcatgggaatgctgacgcagccgatctccttcctcgggctgccggtggtgaccgtgcccctgcgtaccgccagcggtaagccgattggcctgcagctgattgccgcgccgtttaacgaacaagcctgtcttcgcgccgcgcgggcgctggaagcgatgggcattaccgatgcccgagtggcggagagtgcagcatgatcaatctggataatgtagaccgcccggcgatcctcgccgaggtgacggcggcgttttatcagtatgaagaggcgctggtcagcaataacatcgaggcgctggatgcgctgttctggcacgacccgcgcaccgtacggctgggagccggcgaaaatctgtatggcatcgaggcgatccgcgcctttcgcgccgcccgccccgccgccggtctggcccgcgatctgcgccataccaccattaccacctttggcgcggatatggcggtgtgcagcaccgagttcacccgcgaaggcagcgcgcgcctgggccgccagcagcagacctgggtacgcttcccctacggctggcggattgtcgccgcccaggtcagtctgatggactgagtagagtatacgggagcggaccggagactaaggtatccaccggcccgcttccggtccggtaacatgctatttggagtcgaatatcatggtgttcatcagagctgcggaagcaaaagatatcccctcgctgcaaacgctatttctgcagctgggctatcagacggagacggcgatcttagcgcaacgcatcactgccccgcagagcatgatgagtgcgctggtggcggaaacagaaaacgccgtgtgtggcgtaatcgttatcaattttattttaccggtacatgagaaccgtttatgggcattaatttccgcgctggtcatcgaggaatcgtcacgtggatcagggataggccagcagcttctccaggccgcagagcgcctcgcccgcgataaacaatgcgctcagatcgaactttcaagtagtgaaaaaagaatcagagcgcatcaattttatgaaaataacggctacaaggaggttcgcaaacgcttcgttaaacatttgtcttaaccgcctgcgcgcgagggctttccccggatgaccgtaactatattttgcccagcaggatatttaacatgcggcgcaggggctccgcagccccccacaatagctgatcgccaaccgttaacaccgagtagactgggtcattatttagcgacattttcttgtagcggccaatacctacctgcagcgaaccactaatagcagccggggtcaatttactgacactctcttgcttattattgcggacatagtttacccacggatgggaatgggtgactaactcagcaaattccgcttcgctgacctcacgtttaagtttcagcgtaatcgccgcgctgtgacagcggatcaccccgacccgaatgcataaaccattgaccgggatggtacccggcgcaaggccaagaattttattagtttccgcctcgcccttccattcttcgcggctgtttccatcgcccagatcgctgtcgatccacggaatgatgctgcccatgagggggacgccaaaagtctccaccggcatgcccgcgctgttaatcaactcactcactttatttaccaatggcagcacggaacctgatgatgtcagttcatcagcggataaatgctgactgatataagcgctttgtgcgattaattcccgcacctgtttggcgcccgccccggaggcagactgataggtcatcacgctcatccattcgataagatccgcttttatcagcccggccaaccccatcaggctcagcgtaatggagcagttgccgccgacaaacagtttaattcccgcttttaccgcacgatcgatattttcgcggttgacggggtcgagaataatgcaggctctttcatccatccgcagcgccgaagccgcatcaatccagtaaccttgccagccatggttaattaacgccggatagatggctttggtataatccccgccctgacaggtgatgatgatatccatttcggcgagtgcgctaagggaattcgcatctttcagcctgtcgcttctaccattaataaccgggcccggggcacccgcactggaggtactaaaaaaatgcgctgtaatatcgtcgaaatcattttcttcgatcatgcgttgcaacaatactgagcccaccatccctcgccaaccaacaatacccacctgcttcatttatttaacctttataagttatgagaatgttaatttgagtgtcgccataccttatatcgtatcccccaataaaggtcattacccagcacatcgatttttatcattattaaaatgtttcatctgccatcagcgatatttatctcttattacggtcaagaagatataaggcggcggcgactgtccaatattcggcattcaaaggtgaaacggcgtagcgaaacggcagcagcttcttctctgggtaccatgaagagtaacttgcattttgatagttactatgtcaatttgctggcaaaagccacctggttactggacagcccatgaaaaatgaaccgctttgccgcgctccctgccccatcgcccgcagcctgggccgcatcggcgacagctggagcatcatgatcctgcgcgatgccttcgcgggctttacccgctttgacgagttccagaaaagcagcaacgtcgcgcccaatattctgtcgcgccgcctgaaggaactggtcgatgacggactgctggagaaggtgtgctacagcagcaccccgccgcgctacgaataccacctcacgccgcgcggccgcgatttccgcatggtgctgctggcgctggcggaatggggtaatcgccacttcgcccccgaagggcgtcagatgcagctggtggaaatggcaacccagcgccacgtggagccagtcatggtggataaagcgactggggaagagattatcccgggtaaatacgccatggtgccgggccccgccgcatcgccgctgatgaaatatcgtcatgaatatctgctgcgcaaacgcgaaggcgatagcggacaaaaattccagcctgaaccttacagagatgccagcaatgaatccgaccagtaagaaaaatattcttgtcctggcggccctgggggctgccgccctggcggcagcgagctacggcgcttactggtggcataccgggcgctttatgcagaccaccgatgatgcctatgtcggcggcgacattagcgccatctccagcaaagtctccggctatatccagcagctggcggtgcaggacaatatggcggtgaaaaaaggtgacctgttgatccgcattgacgaccgcgattatcgcgccgccctcgcgaaagccgccggagaagtggcggcgcagcaggccgcgctggccgatatccaggctacccgccagcttcagcaggcgaccattgccggctctgcggcctcgttactggccgccacggcggcaaccgaaaaactggctaacgacaaccgacgctataacgccctggccgcgtcgagcgcgatttccgcacagatccgcgataacgcctccgccgattatcgccgggcgcacgccgagcaggagaaggccaaagcggataaaaccgtggccgaacgtcagctggcggtgctggatgctcgccaccagcaaatcctggctgccctggcgcaggcccaggctaacctcgagatggccaggctgaacctcagctataccgacattcgcgcgccgttcgatggggtgattggcaaccgccgcgcgtggtccggctccttcgtcagcagcggtacgcagctgctctccctggtacccgcgcacggcctgtggattgacgctaacttcaaggaaaaccagctggcgcatatgcgtgccggccagccggcgaccatcgtcgccgatgtgctgccgaaccatacctttaaggggcatgtcgccagcctggcgccggcgaccggctcacgcttcagcattctgccggcggagaacgcgaccgggaatttcactaaaatcgtgcagcgggtgccggtccgcattgcgctggaaggtgacggggcaaagcttgacgtcctgcgcccgggactgtcggtgatcgtcaccgtgaacgaaaagagccctcgatgagcaccgttcaggcgctgtccgccccgcagggtctgtcgatgccgacggcgaagaagatcttcgccttcgccagcatgtgcgtggggatgtttattgcccttatcgacatccagatcgtctccgcctcgctgcgggatattggcggcggcctgtcggcgggcgacgatgaaaccgtctgggtacaaaccagctacctgatcgccgagatcattattatcccgctttccggctggctggcccgggtcatgtcgacccgctggctgtttgccgcttccgcggcgggcttcacgctgatgagcctgctgtgcggctgggcgtggaacatccagagtatgatcgccttccgcgccctgcagggactggcgggcgggtcgatgatccccctggtgttcaccaccgctttcgccttttttcagggcaaacagcgggtcatcgccgcggcgacgatcggcggcctggcctccctcgcccctacgctgggtccaacggtgggcggctggatcaccgaaaactacaactggcactggctgttctttatcaacgttgttccggggatttacatcgcggtggcagtgccgctgctggtaaaagtagacagcgccgaccctactctgctgcgcggcgccgactatctcagtattctgctgctggccttgtccctcggctgcctggaatataccctcgaagaaggtccgcgctggggctggtttgatgacgcgaccctgacgaccaccgcctgggtcgccctgctctgcggcgtggcctttgttatccgcaccctgcgccatccgcagccggtgatggatctccgcgccctgcaggatcgaaccttcagcctcggctgctatttctcgtttatggccggcgtcggcatcttcgccaccatctatttaaccccgctgtatctggggagcgtgcgcggtttcagtgcgctggagatcggcctggcggtattttccaccggtctgttccaggtcatgtctattccgttttattcgtggctcgccaaccgcgtcgatctgcgctggctgctgatggccgggctgatcggctttgcggtgtcaatgtacagctttgttccgatcactcacgactggggggcggaccagttgctgctcccgcaggcctttcgcggactggcgcagcagtttgccgtcgcgccaacggtgaccctgacgctgggcagcctgccgcccgcgcgcctgaagctggcctccgggctgtttaatctgatgcgcaacctcgggggcgccatcggcatcgccctgtgcggcacggtgcttaacgacagaaccaatctgcactatagccgcctggcggaccatctgaataacgccaacctggcaatgagcgattttgttcagcgcagcgcggcaaacttcaccgtccaggggatctcgccggatgccgcgcagacggcggcgctgaaaaatctttccgcgctggcgctacgggaggcgcgaacccaggcattttccgatgctttctacctcatcatgatgggttttttacttgccgcgctgctggctcccttgatgaaaaagccgccggcacactgatactacaggagagttaactatgggcgtttccgttaaacgcattgtcgtcaccgggatggggattgtcagcccgctgggctgcggcgtacagcacgtctggcagtcgctgctggcaggaaagtcagggatcacccgactcagcgagcagctggtcgcggatattccctgcaaagtggctggccaggtgccgtccattgacagcgatccgctgcacggcttcgacccgctggcgaccatcccggcgaaagagcgcaaaaagatggatcgctttattgagtttgcgctggtcgccgcgcgcgaagcgctggcccaggccggttggtcgccagcatccgaggccgaacaggaacgcactgccacggtgatcgccaccgggatcggcgggttcagcgagatcgccaatgcggtacataccaccgaggagcgcgggccgcgtcgtctctcgccgttcactatcccctcttttctggccaacctggccgccgggcatgtgtctatcgcccacggcttccggggccccatcggcgcgccggtcaccgcctgcgcagcgggtgcccaggccatcggcgatgcagcgcggatgatccgcagcggcgaggcggatattgccctctgcggcggcgcggaagcggcaattcatcgcgttagcctggccgggtttgccgcggtaagggcgctgtccagcgcctacagcgaccagccggaaagcgcttcccgcccctttgaccgtgaccgcgatggttttgtgatgggagaaggcgccgggcttattgtgatcgaatctctggagcacgcgctggcgcgcggggccacgccgctggccgagctggtgggctacggcaccagcgcagatgcttatcacctgaccgcaggcccggaagacgggaacggcgcacgtcgggccatggagatcgctattcgccaggccggggtgaccgtcgacgagattgatcatatcaacgcccacgccacctcgacgcaggtcggtgataaaggtgagctggcggcgattaaaacgctgtttggcgcgcatccggtcgccattacctcgacgaaatccgccaccggccatctgttaggcgcggccggcgggatcgaggccatcttcaccattcaggccctgcgtgaccaggtggtgccgccgacgctgaacctgcatcaccccgatgaagacgcggcaggcatgaacctggtggcgctgcaggcccgcccgcagaagatgcgttatgcgctgtcgaacggttttggctttggcggcgttaacgccagcctgctgctgaaacgctggcaataatcgtcagctcccctgcggtactggccgacgggggatttccaccgttgcggcttttgccctgctgctggagtaaatcaagtacagcgcgatacccagtgagacaatggcgcctattcggctcatcgagaatggaatcgacgcattgtccagccagccgaagttatcgatcaaggtcagttttgagcgaagaacggaccacactatctaaagaatgatatcgcctattatgttgggaccgctcatgttaaaaaagggatagcttttcttttcattgacgataacgaaggaattttcatggttgaggttgaggaaataaaaaagaaatatcccggcgcagatgcctggcaaatgggtgacagtccggagctggctaacgagcttgctgacctgatcaaaaaagggatcaaaacggcctcttgcggatcttttgcctcttaccagcaggaagaatctgccccgagaatcgggagttataacattattcttgatggtcagaatgttccagtttgcgtgatcagactgatttcgatgcagctggttcgtttttgtgatgtcactgaagcgttcgcccgcaaagaaggtgaaggcgatttaagccttgaatactggaagaaagagcatcagagatttttcagctctgaaggtcatttttctgaagatatggagttgatcgcagaagaatttgaagtggttgaggtgctgtaaggcaaggtcaacgggctgacgttttatcactggccactcataacactgttcgcttctggcgcggagcggacaagctatcgagctaaaggtccgcattgagcaaggagctgacgtgccagctataattggtaataaaacgagagtagaactattctgatttgtttaaaaaaacatttttacatccaagggcaaaatattttttatgctatcttacatgctatctcaatatgccaggctacctgtgcctgaagttactctacgttcatggttaaaacaatggttgtcagagcaggaatcgaggtgtacagacagaagtttctcggcgcgatttccctggagagaaactggattatgtcaggaatattttttacaacgaaaactcaaaattgatggaaagcaatttcttactggcccccgttatcagggcggaaatattaacaaaccttttattgatattgtaggtatggattctgacctaaatcatactgcattagaactcattagtaaggaatggtcacaactcagagctcagtatgtccgcattcttgtgccaggccagtccttcccgcagggtattcctgaccagtatatatatgccacttctttttctgaaccccctgaattcaatgataaatctcttactttgcaagtggcgacatacgaagattttgactggtgttgtcaggccctgggtgatgcctataagcatacatggcagacagttcgcgaactatctgcaagcaatttggtagcagttgatgacgaagagttgtgtgaccatatttctgagagagaagtatatattatctatgaaaacgatgttcgcgccgggttgctaatatgccagaaaggaaacctcgcttttctgagaggatatcgtattactgacaaagtaatacttcctgcttttcgtggtcgatcattgtcggcccgagcgcaactcctgctgtaccgattattaactcattccgattctgaactatctatgtatatgggcacaattattccgcagaatatcccctcgatgaaaactgcagaaagagcgggacgaacttgcatcctaagttatcaatttctacccatctgcagaacccacgactaacagcaatgctaatttatcttcagcctacttccgcttttggcacacaggggatgtccagggcccgggagtactcccctggacgcattaatgggcaggatgtgattgttgcgcaggctatcatatggcctgaggtacagcagaatcaggcttcgtagcaatgagtcggctcacagcgtccggaatccaccacccggtgccgtaaatcaccgcaaggtctgtcataaggtaatttcatcacacatcgcgacaccttttttcttcatgcaagccttctctttcacggtttgtcagaactgtggaccgcagtaatctccactccgtgctttaatcaatgagagtgtgtcgggtgcaaattaaactacctttctcaacagcaaaggcgggatatccctgccctcgcagggtttctgcgtctggtaatatgcccatgacagtctcaaagaccgctttgagggtttcccggtttaaggcacataatcgcgtggcgttgcccccaaaatgcagcgaaaagcagcggtaaaggccgccgggcatgagaaaccaagctggtaagcgacctgtttgattggaacaccgttcgcgagaagatccaacgaagcgcaaattctggctctctgcttccatgttcttaaactaaagcctgtatccttcataaacaatcgggaaaaggtccgttccgacatggccgacataaaagccagctcgctcagcgatgattcccagcgctgattgaccagtagcgatctggccgcgctgaataatcgctcatcattcggcatgggaagcgccatcgttaaaggtggagcctcgctgagaatttccagaagcaacaacgctatcttccgttgactcggtctggcgtagtcctcactgaacagcccagcgataagctctttgactaacggcgtagccgtgatcacatgtacctgctgactcttcgtaaagctcgtacattctgcgataaggctactgctgaaatagatcgccctgagatcggtttgtgaaagcagatgataactatggatatgcagaggcggtagccataatgcccgctgaggagggatcacccaacggtctctctctgtttgcaccagcataacccctctggtggcgaagagtagctgcccctcaacatgatgatggggaggatctgcctcgccgcgttgatagcttatcgcagtactggaccagcctgtggcttcatcatgtcttggcgctttatctatactacctggcatttcagatttagcccctgccattatcatatcgaaactggaaccacccggagtagagccttaggcaatgggtgcgtgacttatcattctgatcatcaaagatattacaggagcttaacctcatgcgtgtacactttatcgtacatgaaagttttgaagccccgggcgcatatgaaacctgggcaataaaccagggtcatgatgtaacttactcacgcgtctatgcaggcgatcggctacctgatgacgccgtaggcatcgattttcttatcgttatgggcggtccgcaagatcctgacaccacgcttgaagagtgcccgcactttaatgctaaagcggaacaggcgctgattgcttccgcggttaaaaccggtaaggcggtgatcggtatctgcctgggttcacagctaatcggtgaagcgctgggcgcgccgttctctcatagcccggaaaaagagattggtaaattcccgatcacattgagcgaagacggcaggaaggatgagatgttctctcactttgggaaaacacttgaagtgggtcactggcataacgatatgccaggtttgacgccagaggccaaaattattgcttacagcgaaggctgtccgcggcagatcgttgcctattcagaccgcgtctttggtttccagtgccacatggagctcacattggacgttgtagaacggctgatcgctcattctgagaaagacctgagccgtgcagcagaatatcgtttcgttgacacgcctgaagcgctccgggcgcacgattacagtgaaatgaatcaagtactttttggctttttggataagctggaagcacgttacacagcagcgcaagcataatgttatgctcggtaagcttgccatcggttttgattttaatgtccgctcctggcacagagcggacaagctatctgagttgaaggtctgatatgagcgatcagcggacgttggctacactgttaaacgtcgcagactcagcttctgactgccagtttttcgcgagttgggccttcaaagtagatgctcctgatatggcaattacggggttgagtcagcacaaagcgaattgtttcccagactgaacgcccattcatcagccgttcccccattttggcctggctatcggcaaaagagtctaaccctgtcagctcgaaatccggtggatacaaaccggtcacacgtatattttctgcggacaactggtgcgagagtttagttataaacccgctaagcccgtgtttactggcaaaaaaagcggggtgcgcgattgaatctgtaaaattaggaatcccacatgaagatataattgaaacgatatctgcgctttctgaacgtcttaacccaggtagtaacgcctgagtcagtagaatagaacctgtcagtccagaactgatggtattgacaatttctgtgtctggttggtcgtctaatgttcctgaaagccactgagcagcattgaggattaaaatgtctatgggtttgtctgaagttaacaactgtgaagaaaactgagaaagggattcaggtagggttaaatcacagagatgccctttcgccattccgccttcagccgtaatgatactgcaagttttttgaatgtcatcagcgcgcctcgcgcaaaaatccacctcgacgccttctcgcgctaaccatacgctcagcgcctgaccaaatcccgtgccaccaccggtaattacagctcttttacctctcagcatcttcatccatcctttattaatgaataggggggaatgtagatatatatgaggaagcagattgacatctttcagttagtgccattttttgacgatagggataagttgtactgctacatttccatcgcgctcctgtgggcatgcaacatccgctcctggcactagtctgccgtaaagggcagctttaagggaggagcggacgagctaacgcaggtgaagatccgctgtgagcgaaaagcggatttttgtcgttctgtcatcaaaactggcgacttatattaggatatcgcaatacccctcgccctcaggctacgtctgcttgaattgattgcctcaagaaggcggaggcggctttccgctgattgccgctacgcgcacagcaggcgtaccggtcatttatgtcagcgtcggattccgcaaggggtatccagaggtcagcaaaaacaacactatcttcgcttcgattaaggagaatggagtttttatggctgataacgagagcacggctattcatcctgatgttgctccagcagaaaatgaagtcgtcatcgtcaaacgcagagtcggagctttctcgtttactgaacttgagatgatccttcgtgctcaaggcatcgaaaacctgattcttacgggtgtaactaccagtcgtgtggtgctttccacagtcggacaagcttttgatctggattaccgccttatcgttgtgaatgattattgcgcagatccagatcctgacaccaatatgtttttacttaaaaaagttctacctcaacatgcttttgttaccagttcctctgaaatatcaaaacctgggcataaaactatgaatttctgacgtcaaaaaacgggaggatataaccggggatcctcagtcatctgaacgtccgctcctggtggcgatagtcagcatcatgtctggcccaggagaaatctccagaagcgtcagtgcgagaaggaaagtcataaacgtttcgatggaaggcatcctggtagagtccgaaaacatatttccgctacgttacctccgttcgatgcgggcaagaagcggacgttgtacttcaatcatcatcgatttgaatgacagcaaggtaacggctaatccaggtgacgtaaatgtgtcgcgatcccccagcttagaacggtacagcttccattaatcagctcgaaaacggcgtaactcgcattgggttgtgcatagcggtgaaaatcatccacagatccactttttaatgtcgcaagcacgccctgaatgacctgcccgtgagacacaatacatattgttcgatgatgatgttttttttccagactggataaaaaatgtatcattcgctgcgaagcatctgagagagactcaccccctggcggacaatactctgcatccagggtgaataatgcttctgcggcgtccggattattttgcagcagcgctacggttgtcatgccttcaaactgaccaaaagcctgttctttcagagccggttcagctatcagtgaacaataaaaacgctcagccaggcgctgtcccatttgccaggcccggccaagtggagacgcgtaaacacattctacccggtaatcactctctgcaagcgctgccaataaagctgatgtttgacgctccccacgaagcgtcaatgcgctatcactgtgtccctgaataatattttttacattccattctgtttccgcgtgtcgaaccagtatcacttgcatcattgcagggtcacataagccgttatttgaaatgttatcatctaaaaaccctcctttgatatgcaggcaagttctcagctctcgacgaaaaacaggaacaagtgtagctgataatggttatgttcagcttcagaagtgacgtagttatcgacgttaacgtctgctctggcacagagcgaacgcttccccttgtcgacgcgaaaagcaactctgcccatgcctctatctcagtaatacctgtatcagttgaacgacgatatacactcccgctaccacctgtatgatccgaaacccccatctcagatagcgccattgatggcgttcgctggcatcagccgcttcaatggcgggatcataacgttttcttttcctggtcctgaatgtatcgaatccccacaggatgagaagaaagatgatgatgattttttcaacgataagatggttcacaaagagagactccggtcttctcacggttacaggcagaatagataaaccgcctggatgtagccaccactaaatgtaggggtacctgaagacgaagccaggccttcccggattatctgtcttatgaccgcgtaaacgcatagcaacgccataaaagcgacattcatttccgacacatgctgccggagtccccttctccgacgcctcaggctgggtgataaaacgacggcggctgcccggtcacgcggcggaacatggtggcgaaagaggacgcattgtcgtatccaagggataatgccacttcgttcaccggtttgcctgctatcaaccatgccagggcgctcaccacgcaggctcgctgtcgccaggcggaaaacgacaggcccagctgcttcaggaaatggcggcgaaaggtactaggactcataaacagcgccctggcccagcgcgccgcaggatcatggatagaggggttaagcaaaaaagcctgacaaagcgccagcagcgccggatgctgcggcaacggaatgtcaaattcgcggaccggcatggcggccagttccagcaacatcaactgtatcagcgtgcgatcgcgtgggctgtcgtacaacggtggtaaatccacagcctcaagcagtagctggcgcaacagcggcgagacgctgatcacttcgcaacgacggtgtttaatgaaagcggccacacaatctggctcaatatacaagctacgcgtggtcacccctgcaaatctgacggcatgcacggtttcaggggggatccagacagcgtgttgcggaggaaccacccattctccgtcctgcgtagtgacatacatcagtccggtcgcgccatacagtagctgtgcgcgacgatgctggtgcgggggcaggataaatccctgcgcatagtcattacctaacgccaccacatcacgatcgagtcgatcgaactcgtcaatttttacgttgcgcacacctgcctccctctgaccaatttacaaaggtaattgagcgctacgcaaatgggaagcagtacgcgaccggtataagctgctcgctcattttcaggtcggggatactctcttgaatgagatcgttattattgcgctggcaggctttactaccggcattaccacggtgctgttcggcttcggcggcggctttgtggtggtgccctttgtctatcaactgatgctccggcagccggcgatcgcgggcaacgccatgcatgtcgcggtggctacctcaacggcggtgatgatatttaacgccggctgggtcagctatcgaaactggcgggcgggcaggcttgccgcgcagacgctgtttccgttgttatggtttattgccattggggcggtggtcggctcctgtctggcggggatattgagcgagaatattgttcgcgcgctgtttattctctatatgctggcaaccatcagcgattgtttgttgcgcaagggttttttcacgggcagcgctcggcgtcgcctgtccctgccagtggtcaccggcggcggtgtgattatcggtacgatcgccgcattgctgggcgtgggcggcagcgtcatgacggtgcccctgctacggcgacacgggtatgcaatgcaggagtgcgttagcgcatccaacccgctttctttgcccgtggcgctatgcggggctgtgacctatgccgtcattggctggcacagcattccgctgagcggatttctggggtttatcagcctgaaaattttaggcctgctcgtcctgaccggctgggccgggatagtgtttagccgccgggcaatccctgcggtacctgatgtatggtatgcgcgcatctatgtgctgctgctgtgcctggtactcctcgccatgcttattcaataatcaaattacattctggtaaaccggtgtaacagacgcgaccgggcggagccctctccctggagagagggccaggatcaggggcaacaagctacccgcgatacggatgggtttcgcgccagtggtcggcaatctgctgccgggtgcagacccacaccttgtcgtgctgctggatatagtcaaggaaacgctgcagcgcgcggaaacggcccggacgcccaagcagccggcagtgcattcccacggacatcatcttcggcgcggtttcaccctcggcgtacagcacgtcaaagctgtctttcagataggtataaaactgctccgcggtgttgaatccctgggcggtggcgaagcgcatgtcgttggcgtcgagggtataaggcacgatcaggtgcggccgctggctgccgtcgctgcaggccacttcgctccagaaaggtaaatcatcgccgtaataatcgctgtcgtagtcaaagccgccgtgctccaccaccagctggcgggtgttagggctgtcgcggccggtataccagccggtgggcggtttgccgaacaggtcggtcagtacctgcaccgctttgcgcagatgctcgcgctcctcggcgatatccatgtgctgatagtggatccagcgccagccgtggctgaccacatcgtaatccgcggccttgatcgccgccacaatctccggatgccgcgccagcgccatcgccacgccgaagaccgtcaacggcagcccgcgctggctgaactcgcgatggatgcgccagaaccctgcccggctgccgtactcatagagtgaatccatcgacatatggcgcgccgggtagctggcggcgccgataatatcggacaggaactgttccgaacccgcatcgccatgcaggacgtgattctccgcgccttcctcatagttgaggacaaactgcaccgcgatccgcgccccacccggccagcgcgcgtgcggcggttcccctgcgtaacctcgcagatcgcgaggatagtgttcctggttctctcccatctcctgccccttttaaaatggatttaacgactgaaactgtccgcttaacgcttttttctccgggaacgctaagtccccatgcttgctggtcgccaggcccagcgcgaccagcgactccaccatcttcaccgccgcgctgacgccatcgatcaccggcacccgtagctcgcgggtcagctcctgcgccagggtcgccatcccgccgcagccaagaacaatcgccccgctgccatcctctttcagcgcgcgaatgcagcgctcacgcactttctcctgtgccaggccactgccgtcttccagcgccagcaccggcaaatcaatggcgtgtagcgccgcgcaatgttgatgaaatccgtactggtgcagcaaatgacgggcgatgatcagcgtgcgcggcagcgtggtcacaatggagaaacgggtggcgaccatcgtcgccatatgcattgccgcctccgcgataccgatcaccggcccctgggccagctcccgcgccgccagcagcgccgggtcgccgaagcaggcgatcacatgcccatccactccctgctcgcgtccggccctgatctgctccagcacgccgaccgccgcgatggcttcgtcaaagtggccctcaattgacggcaccccggcgcggggacagaccgcaaggatctcggtgcccggtgcagcgaccgcacgcgcagcggcgcctatcgtttcagtcatcgccaggctggtgttggggttaatcacttgtatacgaacggaagacatcacgactccttgtggccggcgaacagccgggaaaaatcgggcaggctgacgccatcgcgctcgaagcacaggctggcgacaatatgatcaaaatggtgcatcagcgcctcgctgagcggctgcagggctttatcccgcagcaaaccgaccagctgctggtgatcgtcgcaacggcagccctgtcgccagggggcgccccaggcggcaatcactaaagaggagcgctggctgaggcgggtcaccatctcggtgagcaccgggttgccggagatagcctgcagctgaatatgaaagtcagcggagtggcggatcgccgccgggccgtcgtgcgccgcatgggcctgctgttcacgctgaataatgttctccagcgccgccagatgcggcggctgacagcgcgcgatcacatcggggagattggcgacctcaagcagcgcccgggtgcgaaagatcgcctgggactcttccacgctcgggctggtgacgtgtgcaccacgtttgggcgtcaacgtgaccagttgcacagcggcgagtcgttgcagcacctttctgatgccggtgcggctcacggcgaacacctccgccagcgcctcttccggcagtttgctgcccggcggcagctgatgttcgacgatagccgtcatcagcgcctggtaaatgctttcgtccttgtcctgcagcgctggcgcggcctggagacgatgttcattattcattaacccactccggtttcacttatcgatagcagatcgtatacataaaatttaatttttgtatacaagattcatcattctggcctggatcctgcaatagcctcggcaatccatatcaaagggttttcattcagaggagcaggtttcatgccacattcatcccacacgcagcagacgaagactcacaaggcggccgccggctacagtccgcggctatgtaatgacgatctggcgccgacccacgaccagaactggagctggtacaatatcttttcattctggatgtcggacgtgcacagcatgggcggctacgtagtggcggcgagcttctttacgcttgggctggccagctggcaggttctgctctgcctgctggtgggcatctgtattgtgcagctgtgcgccaacctggtggcgaagccgagccagatggccggggtgccatacgccgttatctgccgtcaggcgtttggcgtcttcggcgccaatatcccggcggtgatccgcgggctgatcgcgttcgcctggtacggtattcagacctatctggcggcgaatgccctgatgctggtcctgctcaagttctggcccttccttgcctcgctgaccagcagcagctttctcgggctatcaacgctcggctggctgtgcttcgccactatgtggctgctgcaggcgatggtgttctggcatggcatgaacgccatcaaacgctttatcgatatcgctggtccggcggtttatgtggtgatgctggcgctggccggctggattgtatacaagactggtctggacggtatctcctttaccctcgccagcaaatccctgagcgccggcgagcagacctggcagatgatcaccgccacggcgctggtggtctcctacttctccgggccgctgcttaacttcggtgacttttcccgctacggcaaaagcatgggcgagatccgccgcggtaaccgctggggactgccgtttaactttctgctattctcggtggttaccgtggtgattgtctccggcacccagtcgctgtttggcaaaatgatcaccgacccgatcgaaaccgtcagccgcgtgggtaacgatctggcggtggccatcggcctgctgaccatgatcaccgccaccatcggcatcaatatcgtggctaacttcgtctcgccggccttcgatttttccaactgcgccccgcagaaaatcagcttccgtaccggcgggatgattgccgcggtgggctcgatactcctgacgccgtggaacctgtttaactccccggagctgatccactataccctcgacgtgctgggcgcctttattggcccgctgtttggcatcctgatcgccgacttctacctgatcaaacgcggccgggtgtcagtggacgatctgtttgacgatacgccgcagggtaaatactggtaccgcaatggctttaacccgaaagcgattgccgccctgctgccgtcggtgggcctggggctgattatcagctttattccggccctgcatgaagtggcgaacttcagctggtttatcggcgtcttcctcggcgccaccacctaccgctggctggctcgcgacgagcgcgaagtgcaggcgaaagccgccttccgctccggcgcggtggcgcaaaaagagtaaccttccccttctgccgcggcgtctggccgcggcaggctgcaaactggcaccaatcttgctgtttatcactattcccagagcgttaagagaaggcaggttcgatgatggattaccagaccgctgtgcgcggtgcattttttgatatcgccggcgtggcagagaccccggatgaggtggccgcccaggcccgctatctcgatgatggcctgttgttcctgcaggaggggaaaattatcgccctgctgccatggcaggagggggaagcctttctgcatcccctgaagggctatgtcgatctgaggggtaagctgctgctgccggggttcgttgatgcccacgttcactatccgcagaccgagatgatcggcgcctttggcgaacagctgctggagtggctcaccacctacaccttcccggtggagagccagtttgccgatgcggagtatgcccaggagatagcgcagttttttgtaaatcagctgataagccatggcaccaccaccgcgctggtgttttgtaccctgcatccggcatcggtggaggcgttattcagcgaagcgctgcgcctcaatatgcgcctgatcgccgggaaagtgatgatggatcgccatgtgcccgactacctgtgcgaaaccgccggggagagctacgagcagacccgggcgttgatccgccgctggcatcagcgcggcaggctgggctatgccatcaccccgcgctttgcccccacctcgactccggcgttgctggaggcggtgcagcgcctgcgggccgagtttcccgacacctggctgcagacgcatctcagtgaaaaccgggaggagatcgcctgggttaaacagctgtggcctgagcatgcgcgctacctggatgtctatcatcactatcagctcaccggcgaacgcagcgtcttcgctcacgggatccatctcgatgatgccgagtggcagtgcctgcatgacaccgggtccgcagtcgccttctgcccgacgtcgaatctgtttctcggcagcgggctgttccgcctgcccgcctgctggcagcaccaggtgcggatgggcatcggcagcgacgtcggagccgggaccaccttcagcatgctgcggacgctgggcgaggcctacaaggtaggacaactgcagagctatcgcctgcgcgccagcgaggccttctatcacgccaccctcggcggggcgcgcgccctgcggctggaggagaaaattggcaatttccagccgggcaaagaggcggattttgtggtgattgacccggcggtcaccccgctgcagcgcctgcgcataggccgctgccatgacatttatgagcagctgttcgtgctgatgaccctgggtgatgaacgcaatatcagcgagacgtgggtgaacggcgagcgggtgtggtgtcaggattgacccctcagccagtcccacttcctgaaaagaacgagaaaacgcaccataccttgtttgccaccttaacgcaggctaaccactacaggcgggggcttattcaggcggcgccatctctactgcgccgtcgctcagagctgtcaaaaggcatgcgcgagacccgattacgcccgtcattttttgccgcatacagcgctttatcgacgcgggaaaacagttgttcaaccgtttcgccgtcatgatgctcagctacgccgatgctgacggtcaccgacagcgtctggtattcgctaaccgcctggcggatcccctccgccagtatcagcgcgcggccgatcggcgaatggggcaaaaaaagcagaaactcttctccaccccagcgataaattttatcttcgcggtcgaccgacgtttccagaatacgagagagcaccagcaggacctcatcgcctttttgatggccgtgaatatcattaatgctcttgaaatgatcgatatcgattaacagcagacaataaccccgggggataaaagttggcgcctcaaccagacggtgaaactcccggcgattaagcaagccggttaacggatcgtgggcggcggaaaattccagctcttttttcagatgcacttcttcggtgatatcgtgaatgatgcatagcatcagtcgaatattatacagcaccaccggcccggcataagtttggacatggcgtagcgagccgtcagccagaatatgcgtaaaattaagcggtttatgaccgccaggcagattggcaatattattcataatggggatgacgtcccggcccagggtatttatttgccaggtatgtttggtgcgcatttcctcatcggaataatgataaaaacgtagcgcggcaatattggcatcgacaatccggccatctttatgagggtcgatcaacagcatcggcgcggtattggtcataaaaaagcgagcgaaaaagccattgttacgccgctggtagcggcgggagccggtatgaatcgactgattttgcgccagcagcttcaccgcttcaaacagcagcaagcaaccacagtcttcggtatcaatcagggtggttttgcaatacaccgactgcaacccattggcggtgggtaacgtccagacttcgaatatctcgctcatggtgtcgagatagcgaaggtagtgctgcagttgcgtttccggacaggtggaataaataccgttacgcatctcattgagcgacatctcgccgctcaatgtccgggaagcctgattggcatagaccaccctttcgttaaaaggatgaactacccatatcggggtgcttaagacctcaaaaacagccagctcttttaataacatacaggccccaaaccgacccactgccggcgcggaacggcacttaacgctgtgcagccccaacgctggtttaaagtgaaagcaaaatagacaccgagaaaccgcaattacgcgcgagcgcgccaagtatagtcggttatgcgcccagtaaagccctctgagggtgactttgcgcgcagtttaaccaacagaagcgatgctgcctttaataataattttatttcaacagcatagcagcaatgccagaacgggtagtcgcttttgatcacagagtgtgcatcgccaacagggttacccggcaggcgcaacggcataggccagggcgggcagagagtcgcttttctgcccaggctaaccgtgatagtttctatcattacgctcattcatagcgacaattaccttgaaaaaaatcgccactaaaatcacccttgccgacattgcgcgtgaagcgcgcgtcggcgtagccaccgtcgaccgggtgctcaataagcgcgcggcggtgaaagagtccacggcgcggcgcgtgctggaggccgcccgccggctgggttttaccctcgagcagccccactatcgcctggctgccggcaaagcgccggtcacgatcagaatgggctttatcctgctgcaggagagccactccttctacctgccgttggcccgggcgctgacgcgcgaggctgccccatggctaccggcgggccaggcgccggtgatactgcattttgccatcgatgcggtggaagcgatggctcaggccattcaccgactcagcgatgaagtggaggtgctcggcctggtggcgctggatcacccgctgattcgccacgcggtggcccgggccgccgcccacggcgtgcgcgtgttcaccctgctttccgatctatcggtcccccagcgcagcgggtatatcggcctcgataatcataaagccgggcgcacagccgcctggtttatcgagcgcttatgtcgggggaatggcgaaattggcattatcattggcgataatcgttttacctgccaggaaagctgtgagatcagctttcgctcctgcctgcgagaacagggcaaggggcaacagatccttgagccggttcgctgtcatgaacgggcggatatcgccaggaccgtgacggaacagatgctgactcagtacccggccctgcaggcgatctacgccccctgcggcggcgtcgaagggatcgtcgacgcgctgcgcgacagcggccgtcagcaggagatcgctctggtctgccacggtccgctcagcgacagtgaactggccctgatcgatggcaccatcgacatcatgcttaaccaccggctggatgagtttgccgccgttacgctgcgcgccatggcggacgccgcttcacgcccccatagcgaggtgatttcactccctcagcctttcgatatcatcaccaaagaaaatatgtaaattttcggctccgtctccagcggagacggttatcgggcggaccgcgccacctctcggtttgataaaaaattatcaaaaaagccatcaattaaaataatgatgattatcataaaatcaaaattccatcattgttgacaatgaaatctttattcaatactcagcggcatcccttgtatgaaaaaggaagccgacatgacacatcctatcgctaacgccccctgcagctggggcgtcgatgacccgaaaaaccctaacctccctgcctgggctaccgtgcttaaggaggcggcgcaggctggctatcgcagcattgagctcggcccctggggttatctccccaccgatccggccagcctgcgcgcggcgctggagcagcatcagctgtcgctggtcgccggcacgatctttgacgatctggtgagcgaggcccatttccccaccctggtggcgctgacccatcaaatctgccgcaatctgtcgcaggtagccgctgccgaaccgatcccgggccgccctttccagccgccctatctggtgattatcgacttcggcaaccccgaacgggcgcgctttgccgggcgcggcgcgctggctccgcgcctcaatgacaaagactggcagcgcatgatggagcacattatcgcccttagcaccctcgcctggcaggagtacggtgtgcgggcggttatccatccgcacgccgggggcagcattgaattcgcggatgagatcgagcggctggccaacgatatcccgcacgacgtcgccgggttgtgtctggacaccggacatctctattacgccgggatggatccgctcgactggctggatcgctattaccaccgcctggactatctgcacttcaaggatgtcgacccgcaggtttatcagcgcgctatccatgaaggtatcgacttcttcactgcctgcgccgaaggggtgatgtgcccgctcggcagcggcgccattgactatccggctatcaaagactttcttgcccgccgggggtatcagggctggataaccattgaacaagagcgcgacccgcgccatgccgcaggcagcctgcaggcggtcacggaaagtctgcgctatctgcgcgacgtcggattctgacaggaggcacgacatgattaacggtttaaaacctctcgaccgcaccctgcgctggggcatggtcggcggcggcggcagcagccagatcggctatattcaccgctctgcagcgctgcgcgataacaccttcacgctgctggccggcgcctttgatattgatggcgagcgcggacgccagttcggccaacggctgggggtggatcccgaccgctgttacgccgactatcaaagcctgttccgcggcgaggctgcccggcctgacggcattcaggcggtgtcagttgccacgccaaataacacccactatgccatctgccgggccgcgctggaggccgggctgcacgtggtgtgcgaaaagccgctgtgcttcagcagcgaggaagctgacgagctggtggcgctcagccagcggcggcgcaagatcatcggggtgacctacggctatgccgggcaccagctgatcctgcaggcccggcagatgatcgccgacgggctgctgggcgatatccgtatcgttaatatgcagtttgcccacggttttcacgcccagccggtggaacaggaaaacgccagtacccgctggcgggtcgatccccgcttcgtcggccccagctatgtgctgggcgacctggccacccatccgctgtttctggtcgaaaccatggccccgcagctgaagatcacccggctgatgtgcgccagacaaagcttcgtcaaaagccgcgcgccgctggaagataacgcccatgtactgatggagtatgacaacggggccatcggctcactgtggagctccgccgtcaactgcggttcgatgcacgggcaaaaggtgcgaatcatcggtgaaaaagccagtctcgaatggtgggatgaacagcccaaccagctacgctacgaaatccagggcgaacccgtgcgcatcctcgagcgcggtatggactatctcgatccgctggcgcgtcaggatgatcgcatcggcggcggccatcccgagggcctgtttgaggcatggtcgaatctctatcgccgcttcgccatcgccatggatgccgccgaccatcgcgacgaggcgctgctggccgacttctggtacccggacgcccgcgccggggcgttcggcgtccgctgggtggaaaactgcgtgcgttctgccgacaacggcgcctactgggtcgacttccgctaactcgccggctcagggcgttcgtcctgagcctttacggctatttttctgtccgcgccagctgggttttatccgcctcatgggcgcggtccgccagcccctggaacgctccggcgccatagtattgcgcgggaaccggcaatgcctgcatatcgtgccctggatagatctgcagttcgccgaggtcgcgtaagcggaatcccccgacctgctccggcatggtcaggcgatacggcggcatggtttcgaatgggaccggcgtcggcagccggttttcctgtagatcgtagttacgcttcagtaccagaaacttatccggcacccgccggtgactgttccaccagtcgccgtcgatctgctgaaacatcgcttccgtctcaccgcgcgtcgccaccagcagccgggtcagcacttgtttcagcgccgcatccatggcctggttataatcctccagcgaaccgccgtggccgctgaggatgacattaatcgccagcctcgcgcccagtaaattggagtagagatcctcgggcgaaaaagcggaaatctcttcggaaaacccggggaccgactggaagccataccactgggcgatctcatgccactgggcgatttcgaaggccagatgcccggcgagccaggcagccagctgatagcgctgcctgacgcccgccggcggcgtaaaggcattcagctgcacgcggcgcacgcccagttcttcactgtagaagatccgccccgcctggcccagcgtcggcgcaatacgattgaacagataaaaggtgttgtccgccgtatcgcgcacatgggcgatatcaataaacccgccgcggcgggtatagataagcccgttcttctcctcgctgagccccagcagatttttcaccgcaccgaacgcgctgtcgttgtaatggtgcttacccagcgtacccagagtcaacacattaccgatctggtacatcgggatcggaatgcccgccgcgcgcacgtgcaggtcgtaaccaaaagcgcagcacggtcgcagcgactccggcggcggcagctcaccgagggtgggcgccgtatggatcgccgtcacggcgggtagcaccggatcctgcgccagcgccggcagcgccagcgccagcgccagcgcgaataatagccagaaggctttacacatcaacagcctctccacagcaataaaagtgcgcgcatcttaccggcagatagcgcctgcggttttagttaaaaacggtattcagcgccgacaaagaaactattgcgcgcggaaaagcgctggctatcccccattaccatcatcctgcggcaaggtggcgcggtgattgtattcaaaaggtgaatgtcgtataacatagcgctaccgaggggtgtcccgtgagggctgagatggcgcaagccgaaccctttgaacctgatctgggtcatgccagcgaagggacgggtcggcaattttgccagcattaccgccattgcctgttcacacccctgcacgcccggatctcccctgaataaatggaggtcctgtgatcgttcccgcttttagccaaggtctttacggccgtttacgccagctggccgccgctgactggcagcgctatgtggcgcatcctttcgtccagcaacttgcctctgggacgctggcggaaaacgcctttcgtcgctatctgacccaggattatctgtttctgattcactttgcccgcagctacgcgctgctggtgagtaaactgcgcacgctgccggagatgcgggccgcggccgcctcgatgaatgccatcctcaacgaactgccgctgcacgtcggctactgtgcccagtgggggattagcgaaccggagatggccgcccaacctgaagcccccgaaactctcaactatacccgctatgtgctggatattggccactcgggtgacgcgctggatctgctggtcgccctgatgccctgcgtcgcgggctacgccgaaatcggtctcggcctgctgcaacatcccgccacccgactggacgataacccctacgcctcatggatccgcaactatggcgatgaaggctatctgcagggcgtcagcgccgcgctggcgctgttggaaacggtgtggcagcagcgcgggagcgaggcgcgaatcactgagctgagcgagattttcaccaccgccacccgccttgaggcgcagttctggcagatgggcctcaacgccgcggcggagacccgggcgtgacggcgccgggtattgaggtccgtggcctgagcctgcatgtcggcgaccgtcggctgttcgacaacctgtcgtttacggtccccggcgggcagtgggtgtcgctgctcggcgccagcggcgccggcaaaaccagcctgctgcgggtgatggccggtctggcgcccgccacccgcggagaagtggtcgccagcgatgggcaaccgattcagggccgtctggcgtggatggggcagaaagatctgctctacccctggctgagcgttagggacaacgtcgccctcggcgcgcggctgcgcggtgaaaaagtcgatcgtgcccgggtcgccgccctgcttgaacaggttgagctttcatcctgcgccgacgcccggccggcgactctctccggcggtatgcgtcagcgcgccgcgctggcgcgcacgctgtatgaggatcgacccatcgtgctgatggatgagcctttctcggcgctggataccctcacccgtacgcgcattcagaccctggcggccaccctgctggccggtcgcacggtggtgcttatcacccacgatccgcaggaggcctgccggttgagccaccgcctgctggtcctctcggcggccgacggcgacattgatgatagccatcacctcgccggcacacctccgcgcgcgccggacgcgcccgatctcctgatcggccaggccgccctgctgcagcagctgatgagggcccaaccatgactggacgtctctggcgcggcggcatggtattcggcgggctgatgctcctctggggtctggccagccgcagcggcattccccattttcttttaccgtccccgatggcggtcgccgaggcgctatgggttaatcgcgcctatctcggctggcatacgcttatcacgctcagtgagatcctgagcggcctggcgctgggcgtgacgctcggcgtcaccctggcgctgggcatgatcctctccccccgtctgcagcgctggctgatgccgctggtgctcaccagtcaggcgatcccggtctttgccctcgccccgctgctggtgctgtggctgggctttggcatgagcgccaaagtggcgatggcggtgctggtgattttctttccggtgacttccgccttctttgatggcttgcggcgggtcaaccaggagtatctcgatctggcgcgcagcatgaatgcctccttcggcgctcaactgcgacatgtccgcctgatggccgccctgccggcgctgggctctggcctgcgcatggcggcggcggtggcgcccattggcgcgatcatcggcgaatgggtcggctccgccgaggggctgggctacgtcatgctcaacgccaatgcgcgactgcaaaccgatatctgcttcgccgcgctgtttattttagtactactgaccctcctgctgtggctggcggtagataccctgctacaccggctgatcgactggtcgccggaataagaatgacgtaataaaggaaaacagatgaaaaagtcgctattcgccggggcaaccttgacggccctgttcagcggccacgcgctggccaatgaaccgctgacgctggtgctggactggtacattaatcccgaccatgcgccgattatggtggccgagcagatcggcgcctttaaggcccaggggctggacgtcaggattgtccccccttccgatcccgcgctgcctccgcgcatggtggccgcccgtcaggcggatctggccatcacctaccagccgcaggtgcacttcttcgctgacgaagggttaccgctggtgcgtgtagggactctgattaattcgccgctgaatacggttatcgccctggataagcagatcaaaaccccggcagatctacaaggcaagaaggtgggctactcggtcagcggaattgagcaggccaccctggcgaccatggcgcaacatgcagggatcgatccggccagcatcaaactggtgaacgtcaatttccagctgaccagcgccctgctggccggccaggtggacgcggttatcggcggctatcgtaatatagaagcgcaggagctgaagctgcagggcaaaacgccggtggtgatgaacgtcgaagattacggcgtgccggcctatgacgagctggtgattgtcgcccatcgcgacgcaattcatgaggcgaagatccgtaaattcctcaccgccctgcaggcgggagtgggctatctgcgcgcccatccgcagaagagctgggaggcgttcgccgccgcccacccggagcttaggaccgaactcaaccaccaggcgtggttgcaaaccgtgcccctgttcgccaccgatccggcagcgctggataaaccgcgctacgagacttacgaacagtttttatataacaataagttggtgaaaaaagttacacctttaacaaattatgcggtggaactgcattgagtcttgctatcgctgacggaaggcattccgtcagcgctttaacgtagcggcaataaaaatatagagactttctcactaataattacactttaaagggttatagtgacagagtgttgttctattataattcagcgagttacgttaattttgcccctggtaagaataacgtcaaaatagcgcaatcaataaaacgttgaatgcggatttaaaaagccatatattgtgcgcgctttatgaatgccaattcaatttcttacaccaattattcaaccagcgttcaaccgcaatgctggttgtgggagtgatatgatgacggataaagtccgtattgatactttacgtgccgatttattagacgcaaacaacgaaacctttttggcccgtcaggccgaattcgaatcgaatgtcaggagttacccgcgtaagctgccgctggctatcactaaagccgaaggcgtgtggctgacggatgcggataacaaacagtacctggactgcctcgcgggcgccggtactctcgctctgggccacaaccaccctgatgtattgcagagcatccaaagtgtcattaccagcggcttgccgttacatactctcgatcttaccaccccgttaaaagatcgcttctccgaatacctgctctcttgcctgccgggcgaagggaaagaatattgcctgcagttcaccggcccgtccggcgctgacgccgtggaagctgcgctgaagctggcgaaaaaatacaccggtcgtaccgcggtgatcagcttctccggcggctatcacgggatgacccacggcgcgctgtccgtcaccggcaacctgtcgccgaaagcggcggttaacggcatgatgccggaagtccagttcatgccttacccgcacctgtatcgttgcccgctgggcatcggcggcgaagccggcgtgaaagccctgacctactacttcgaaaacctgatcaacgacgtggagagcggcgtccgtaaaccggcggcggtgatccttgaagccgttcagggcgaaggcggtgtgaacccggcgccggtcgagtggcagcagcgcatccgcaaagtgaccgaagagcacggcattctgctgatcgtcgatgaagtgcaggccggctttgcccgtaccggtaaattcttcgccttcgagcacgccggtattcagccggacatcatcgtgatgtcgaaagcggttggcggcgggctgccgctggcggtgctgggcattaaaaagcagttcgacgcctgggaaccgggtcaccacaccggcaccttccgcggcaaccagctggcgatggccaccggcctgaccaccctgcgtcatctgcgcgacaacaagatcgccgacaaagtcgccgcccagggcgagtggctgaaaggtaaactggccgagctgcagaaacgctacccggtgattggccacgttcgcggtctcggtctgatgatcggtatcgaaatcgtcaagccgaacgaagcgcaggatcacatgggctgctacccggctgacggcgaactctctgccctgctgcagaagaaatgcttcgaagcgggcctgatcctcgagcgtggcggtcgtcacggctgcgtgctgcgcctgctgccgtccctgctgatcagcgacgcggagctggacgtgttcctcgacaaatttgaacaggccctgctggccgccggcgtaaaaccggtctgagtggagtaagtgaccgccatgtccacattgaatccgattcttgctggttcagcgcagagcgttgaagcctatcagcaggttatcgagcagaccagccaggccgttgtgcagtggctgaagcaacctgagatgtatcaggggaaaagcgttgacgagctgcgtgagcgtatctcccttgaatttaacgaacagggtttgggtaaccaggcggcgattgatcgtgcgatcgagtacttcctgaaagatagcctgtcggtgcatcacccgcagtgcgtggcgcacctgcactgcccgagcctggtgattagccaggcggcggaagtgctgattaacgccaccaaccagagcatggactcctgggatcagagcccgtcggcaaccattatcgagatgaagctgatcgaatggctgcgcgcccgggtcggttttccggcgggcgacgccggcgtcttcaccagcggcggcacccagagcaacctgatgggcctgatgctggcgcgcgacgccttcttcgcccgtcaggggcactccatccagcaggatgggctgccgggggatatccgcaagtacaaagtcttgtgctcggaaaacgcccacttctcggtgcagaagaacatggcgctgatgggcctcggctaccgctcggtaacgctggtgaaaaccgacgaattcgcgcggatggacgtgtccgacctgcaggcgaagattgcgcaagcgcaggctaacggcgagcagatcatggcgatcgtggccaccgccggcaccaccgacgcaggcgctatcgacccgctgcgcgacatcgccggtatcgctgcggaacatcagatctggctgcacgttgacgcagcctggggcggcgccctgctgctgtctgagcagtatcgcgactaccttgacggtctggagctggtggattccgttaccctggacttccataagcagttcttccagaccatcagctgcggcgcattcctgctgaaggacgcgcgccattacgagctgatgcgttatcaggcggcctatctgaactccgagttcgatgaagaacacggcgtaccgaacctggtgtctaagtcgctgcagaccacccgtcgcttcgatgcgctgaagctgtggatgggtctggaagcgctgggccagaaacagtatgcggcgatcatcgatcacggcgtcacgatggcgaaaaacgtggcggagtacgtgaagtcgcagccgacgctggagctggtgatgcagccgcagctggcgagcgtgctgttccgttcccgtccggcgcagatggccgggagcgacgcggcggctatcgcgctgctcaaccagcgcgtcggcgacgccctgctggcctccggccgcgctaacgtcggcgtaaccgagcacaacggcgttacctgcctgaagctgaccctgctgaacccggtggtgacgctggatgacgtgaaggttctgctgaacctggtggagcgcaccgctcaggagctgctggcgcaataacctgccttagcgaggcggcgcctgccgccccgctgtcagccttgcctgcaataagccgataatgtccttatcggctttttttatttctttccgcaccgctaatgctctcttcgcagggcccgttgacccctgcccctcgcgatgccacagtactatcccgaaaataacaacgttcaggataaacgtcctgaaaatggggatgatgatggagaaacgcttaccagggctggatctcgacgccctgcgcagctttgtgaccggcatggagtgcggcagtttcgcccaggcagcgctgcgcctgtcgcgttccacctccgcggtcagcgcccagcttaaaaagctggagagtcagtgcggtgcggcgctggtgaccaaacaggggcgccatctggtgctcaccgcggaaggcgaaaagctgatgagctacgccagacgcctgctggcgctcaatgatgaaaccctgcgcgcgctgcagggtgagcggctcaccggcgagatccaccttggtatgcaggaagattttggcgaatcgctgatgccggagatcctcgggcaatttaaacggcatcatccgcaggtgcggatagtcgccagggtggatcgcaatggtccgctgcgccaggcgctggcggaagaggcgctggatctggcgctgctgtggcaaaccgaagatcagggttccgggctgggcctctgcccgctggcgtggattgcgcatcctgacctggatattcgcgctctgctggtctccggcgagccgctgccgctggtgatgttcgacagcccgtgcctgatgcgctcccgcgccattgcctgtctcgatgccgcggggatcccctggcaggtggtgttcgtcagccacagcctgagcggcatctgggcggcggtgcaggccgggctgggcctgacgatacgcacccgcatcggcatgccaggcaacctgcgccccgcaggaggactcctgccagctccaggaagtctggccgtcagcctgcgacaaaccccgcgtgaggaacaccattccgccgccgtggcgctgctcggcgaactgatgaccgaggccctgcagggatggctcaacaggtgacactgtcacgccatccctgcgcgctgatgtaggccgggcaagcgcagcgccgcccggcaatgggtataagggctggagggttccgtccgccagacgcctgcgccgcgggtcaggctttgctctcctgcagcagctgctggatcacctgctcctggcgggcataatccccttcgccgaaggcggtataacgcagctgtccgcgagcgtcgaaaatgtaatgcgccggccagtactgattgccgaaggcattccagatggcgtactcattatccgccaccaccgggtaggttatccgccagtccttcaccgcctggcgcagcaggggcaacgaacgctcccagggatattccggggtatgaacgccaatcaccaccaggcccgccgcgcggtatttgttcgcccagtcgcgcacgtaaggcagggtatgctgacagttgatacactcccgggtccagaaatccaccagcaccactttgcccttcagacgctccggagttaacgccgggctgttgatccatgcgctgccccccgccagagagggcatcgcgctgctgggctgcggcgcggcgatcggctggaggctggtcttttgctccggctgcggcagacgggcggccagccgctgctccagcgcctggctcagtccaccagcgctttgcagatagcgatcgccgccgctagcgatcagcgccaccgaggccagcattgccccccctgccaaccggcgcagccgttcgccgaacgcctgtccgcgacgcaatctggcgatcaacgccgccccgcaccaccccagcaggaataacatcagcgccccgccgctgccgtaggccagcagcaagccgccggtagtcgcctgccccggatgcacaaagcccaggctaagtatcgctcccaataccggcccggcgcacggcgcccacagcaggcccaccgccagcccggccagtagagaaccgatccagccgcgctggcgtgaactggcatcgttaagctgattccccaacgctaccaggggtgaggtcagccgttgcgcgacgcgttgcgaaagcagactcagcccgaccagggcgaagaacgccagcgccagaccgcggcctgcgagggtcagattcaccacccagccgctggcgaccgtcaccagccaggagacagcgccgaacatcagcgccatgcctgccagcatgatcgccagctgcccccggcggccccggacgctggcgaacagcagcgggatcaccggcagcgtacaggggctcagcagagttaacatcccgcccaaaaatgcaattaatatcgacatcgccttctcctcattatgccatcgctgccgaaagtggcagccacgacattacagcaaggccatgtaaggcgaatgtgtcgggaaagggggagaattgtcggcttagttatccgttttccccgaagatacatcaggatacaatcccgccgcggcaaggcgaacgctggcgtccaggccgccctgcgggcggttggccaggcgcagcgcgccgtccatctggctgaccagctgcgcggcgatcgccagccccaggccggtgccgccggtatcgcgattgcgcgagtcctccaggcgataaaacggctgcagcaccgcctgcagcgcggcctcggggatccccggcccctcatccagcacatgaagggtgatatcccccacggcgtcacgggtcagggttaccgtggccgtcgtaccgaatttcaaggcgttatcgataagattggtcatcacccggcgcagagcctgcggcgggatccacaccaccccggcggtctcttcgggacaaaactggaccggccggccgacatcggcataatcgcagacgatggtgtcgagaaacgcatcgagattcagccgctgtcgcgcctcctccagcggctgcgaggtgcgggcgaaggcgatgccctcccgcaccagacgggtcatattgtcgagatcctgcagtagcttatcgcgcagttccggctggtcggccatctccacccgcagcttcattcgggttatcggggtttgcagatcgtgggagatggcggcaaggatccgcgctcgctcctgcagatgatcgtggatgcgcgcctgcatcgcgttaaacgcgcgagcggcgcgacgcacctcctccggcccctgctcggccatagttcccgccgtgtcgctggccggctccagggcatttaccgcgtgggtaaagcgggagatgggcagcaatacctggcgaaccgcgtaccaggcgcaggccagcaggaggacaaactgagcgatcagcaccaccggcagccagcgggcgatggccggtagtttcggccacaggtcgagggtcaacggcgcgccgtcgtgaagggtaatatgggcctgaatatgctgccgcgggccggggatcgccacaatacttaccggatactgcgcgctcagcgcctcctgcagggagcgcgctgcgtcccgggcgcgccagttgtccgggtaatcgccgcgctccccggcgtccagcagatagcgataattgccgcgcgccagcttcggcagccattgtgggcgctcagcggccggcaggcggtcaaggatcgccacgctggtggcgacatcggaagccagattgcccagcatcacgctgcgagcgctgctcatacgctcataaaacagcagcgacagggttaaggtattcgccagcagcagcgccagaaacagcagcgccatcagcctcgactgcagcgaggcgggccagaacctcattcatgcctctcgcgaatggagaccggtaccgacagcatatagccttcgctgcgcaccgttttaatgtaggccggctcgcgagcatcctcccgtagccgctggcgcagtcggctcaccagcaggtcaattgaccgctcaaacagttccgcgtcgcgtccctgggtcagattgagcagctgatcgcggttcagcacccgctgtggatggtcgagaaacacccgcagcagccgatactccgccccgctgagggcgacgatggcgccgctgtcgtccagcaaatggcgagcggcagtgtcgagcagccagtcgccaaaggcgatcagcctgcccgcctcggtgatctgcaggttcggcggcagcgcccgggtgcggcgtaaaatagctttgatgcgcgccagcagttcgcgagccacaaagggcttaatcagataatcgtcagcccccatttccaggccgaggatccggtcgctgtcatcggtgcgggcggtgagcatcagcaccgggatatcctgctgcgggttagcgcgcagctggcgacagagcgttaagccatcctctcccggcatcataatatccagcacaatcaggtcaatttgatggtttttgagtaccgaccacatggctttgccgttcgccgcgccgctggcgcgatatcccgatttttccagatagtcgacaatcagttcccggatgtcgcggtcgtcgtcgacgaccaggatgtggtcaatacgctccaaaggctgctcctggggcaaaataaactcttcacaagcataagccgtgttgccggaagcgcaacgtcgcgccgccggcaaggcgcgggttacaaacgatcggcgtccaccaccgcctgcacaaacgccgtcggatcctcctgcggcgggttatggcccacagctcccggcagatcccggtgctcatatttaccggtaaatttggcacggtagctggcgggagccggatgcggcgcgccgttattcgccccttccagggtgatggtgggcacggttatcggcggtagcgccgccagccgttgttcatagccggcatacttcgcttcccctttctccagccccaggcgccagcggtagttgctgatggtgatcgccacatggtccgggttatccagagcccgggcggttttggcaaaggtcgcgtcgctgaattgccactgcggcgacgcctgatgccagataaatttcgcaaagtcgtgggtgttttgccggtaaccggcctccccacgcggggtggcaaaatagaattgataccaccacgacagctcagcctgcggcggcagcggtttttcgccaatctgctgactgctgatcagatacccgctcaccgagaccagggatttcacccgctgcggccacagcgcggcgacgatatccgccgtgcgcgcgccccagtcaaaaccggccagatccgcctgcctgatgttaagggcgtccatcagatggacaatatcggccgccatcgccgacggctgaccgttacgcggcgtgctggcggagaggaaacgggtcgtgccgtagccgcgaagatacggcacgatcacccggtaacccttctgcgctagagccggcgccacctgggcatagctctgaatgtcgtagggccagccgtgcagcaggatcaccggctggccgtcgcgtgggccgatatccacgtagccaatattcaggtcgccggcgcggatctgctggatcttgtcgaacgcccccgcgtcttcagcggcgcaaacggcggcggaccacagggtggataaccccagcgccacggcgctggtatagcggatcagggataatctgttcatcgttttctcaccttttatcgtcatcaagagagtacgtgaccagtaaagcggaaatttgtatccgccatgtgcccgaccggggccatttttctctcttaatgtcagcgcagcaccgcgagatacagtgtgatacaaagtcgaggttggcaattgttgcgggcatgtgaatttatgcttgccccgggagataaatccgttaccgtggcaggcatttttcaccacttaagaacgcaggaacccgctatggcgatttttgatggtcacaatgacctgctgctgaatctctggcttcaccatcgcgaggatccggtgagcgccttctttgccgggatagagaacggccatctcgactatccgcgcatgctgcaaggcggatttgccggcgggctattcgcgctattcgtgccaccgcaggaatatattgcccgtatgacgccgcaatacgccagccaacgatgggatccgatcgatatcctctggcagcaactggccatcctgaagcaacttatcgcgcactccgctggacgcttgagattgtgtctgagcgcggcggatatcgagcgctgccgcgaggataaggtactggcgatggtggcgcatattgagggtgccggaggttttgatggcgagggccgcgacctgcaggccttttatgccgccggggtccgcagcattggtccgttctggaatattgcgaaccgcttcggcagcggcgttaacggttcgtttcccggtagcccggacactgggcctggactgacagcggcaggtatcgatctgattaagcaggtcaatgccttgaagatgcagattgacgtgtctcatatgaatgaaaaagcgttctgggataccgcccatcacgcaacgtcaccgctggtggccacccactccaatgcccatgccctgtgcccgcagccgcgcaatctgaccgaccagcaactgcgggcgatccgcgacagcggcggcgtggtgggcgtcaatttcggcaatgctttcctgcgcgccgacggccggcgcgatagcgacacgcccttaaccaccattgtccggcatatcgactatcttattaacataatgggtgaggatcatgtggcccttggctcggattttgacggcatcaccctgccggacgagctgggcgatgtggccggcttaccgcggcttatcaatacgttgcgcgctagcggctatgatcaattggtgctggataagctgctgtggcgtaactggctacgggtattaaaaaatgtttggcaacaataggttatattgtaaacataaagttaattccttacagattccgggttgatctctctcccggtgaagcgcaatatgcggcagccgtcacagatccaccattatccgtgaggcctgtagtcatttttaagaggaacaaaacatgtggaagaaacctgcttttatcgatttacgtctcggtctggaagtgacgctgtacatttctaaccgttaatcgccccgcccgccgttcgcgcgggcaccttcattcattacccggtccgtcttcatgttcattaaagtcctcggttccgccgccggcggcggtttcccgcaatggaactgcaactgcgccaactgtcagggtctgcgcgatggcaccattcaggctgccccccgcacccagtcgtcaattatcgtcagcgacaacggtaaagagtgggtgctgtgcaacgcctcgccggatatcagccagcagattgccaatacccccgagttaaataaagccggcgtactgcgcggaacgcatatcggcggcattattctcaccgacagccagatcgaccacacaaccgggttgctgagcctgcgggaaggctgcccacatcaggtctggtgcaccccggaggttcatgaggatctctccaccggcttcccggtgtttaccatgctgcggcactggaacggcggcctggtgcatcatcccatcgctccgcagcagccttttaccgttgacgcctgtcctgatttgcagtttaccgcggtgcctatcgccagcaacgcgccgccctattcgccgtatcgcgaccggccgctgccgggtcataacgtggcgctgtttatcgaaaaccgccgcaacgggcagacgctgttctatgccccggggctgggtgagccggatgaaacccttctgccgtggctgcaaaaagcggactgtctgctgatcgatggcaccgtctggcaggatgacgagctgcaggccgccggcgtcggacgcaataccggccgcgatatgggccacctggcgctcggcgacgagcacgggatgatggccctgctggcctctctgccggcaaaacgcaaaattctcattcatattaataacaccaacccgatccttaacgagcagtctccccagcgccaggcgctaacgcaacaggggatcgaagtgagctgggacgggatggcaatcacccttcaggataccgcatgctgatcactgacacgctgtcgccgcaggcctttgaagaggctctgcgggctaaaggcgccttctaccatattcaccacccttaccacatcgccatgcataacggcgacgcgacccgcgagcaaattcagggttgggtggcgaaccggttttattaccagaccactattccgctgaaagacgcggcgattatggccaactgcccggatgcgcaaacccggcgcaaatgggtgcagcggatcctcgaccacgacggcagccacggcgaggacggcgggattgaagcctggctgcggctgggggaagcggtcggtttgagccgcgacgatctgctcagcgagcgtcacgtgctgcccggcgtgcgcttcgcagtggatgcctatctcaatttcgctcgtcgcgcctgctggcaggaggcggcctgcagctccctgaccgagctgttcgccccgcagatccatcagtcgcgcctcgacagctggccgcagcactatccatggatcaaagaggaaggctacttttacttccgcagtcgtctgagccaggccaatcgcgacgttgagcatggcctggcgctggcgaaggcctactgtgacagcgctgaaaaacagaaccggatgctggagatcctgcagtttaagctcgacattctgtggtcgatgctcgatgccatgaccatggcctatgccctgcagcgcccgccctatcacacggtcaccgacaaggcggcctggcacacgacccgactggtgtaatcatgcaaaaaacgtccatcgttgcctttcgtcgcggctaccgactgcagtgggaagccgcccaggagagccatgtgatcctctatccggagggtatggccaaactcaatgagaccgccgcggcgatcctcgagctggtcgatggccggcgcgacgtcgcggcgattatcgccatgcttaatgaacgtttcccggaagccggcggcgtcgatgacgacgtcatcgagttcctgcagatcgcctgtcaacagaagtggatcacctgccgtgagccagagtaaacccaccgtcaatccgccactgtggctgctggcggagctgacctaccgctgcccgctgcagtgtccctactgttccaatccgctggacttcgcccggcaggataaggagctgaccaccgaacaatggatcgaggtctttcgccaggcgcgggcgatgggcagcgttcagctgggcttttccggcggcgagccgctgacccgtaaagatctgccggagctgatccgcgccgcgcgcgacctcgggttctataccaacctgatcacctccgggatagggctgacggagagcaaactggacgccttcagcgaggccgggctggaccatatccagattagcttccaggccagcgatgaagtgctcaacgccgcgctggccggcaacaaaaaagccttccagcagaagctgaccatggccaaagccgtgaaagcgcgcgactacccgatggtgctcaacttcgttctccaccggcacaacatcgaccagctcgataaaattatcgagctgtgcattgagctggaagccgatgacgttgagctggccacctgccagttctacgggtgggcgtttcttaatcgcgaagggctgctgccgacccgggaacagatcgcccgcgccgagcaggtggtcgctgactaccggcagaaaatggccgccagcggcaacctcaccaacctgctgttcgtcaccccggactattacgaagagcggccgaaaggctgcatgggcggctggggatcgattttcctcagcgtcaccccggaaggcaccgccctgccttgccacagcgcgcgccagctgccggtggcgtttccgtcggtgctggagcagagtctggaatcgatctggtatgactcattcggcttcaatcgctaccgcgggtatgactggatgccggagccgtgccgctcctgtgatgaaaaagagaaggacttcggcggctgccgctgccaggcctttatgctgaccggcagcgccgataacgccgacccggtgtgcagcaaatccccgcatcatcacaaaatcctcgaggcccggcgcgaagcggcctgcagcgacataaaagtcagccagctgcagttccgcaaccgtacccgctcgcagctgatcttccaaacccgggacctgtaatgacgctggcgacccgcaccgtcactttgccgggcggcctgcaggccaccctggtccatcagccgcaggcggatcgtgcggctgccctggcgcgggtcgccgccggcagccaccacgaaccgtcgcgcttccctgggctggcgcacctgctggaacatctgctgttttacggcggagagcgctaccaggatgatgaccgactgatgggctgggtgcagcgccagggcggaagcgtgaatgccaccaccctggctcgccatagcgcgttctttttcgaggttgccgccgatgctctggctgatggtgtcgcgcgtctacaggagatgctgcaggccccgctgctgctcagggaagatattcagcgcgaagtggcggtgattgacgccgagtaccgcctgatccagcagcatgagccatcgcgccgggaagccgcggtgcgccacgccgccagcgcgcccgcggcgtttcgccgctttcaggttggcagcgccgacgcgctggcgggcgatctcgctgcgctgcaggccgccttaggcgattttcaccgcacccattacgtcgcccggcgaatgcagctctggctgcaggggccgcagtcgctggaggctctcggcgagctggcggcccgtttcgccgccgggcttgccgcaggcgaggctccgccgccggcgccgccgctgcgcctgggcgagttcactgcactgcagctggcggtctccagccagcccgcgctgtggcgctgcccgctgatcgctttaagtgacaacgtcacgttactgcgcgagtttttgctggatgaagcccccggcagcctgatggccggcctgcgccagcgccggctggccggggatgtggcgctgaactggctgtatcaggatcggcacctcggctggctggcgctggtcttcgccagcgaccggccggaagaggtcgaccggcagataacccactggctgcaggcgctacagcaaacgacgcctgagcagcagctacactactatcagctatcccggcgccgctttcaggcgctgtcgcctctcgatcagctgcgccagcgggcattcggctttgcccccggcgcgccgcccgccgggttcgccgatttttgcgccgccctgcaggccgccccgtcggtcagactggcctgtcagaccgtttccccaggggagcctgttgccacccagggctttagcctgccgcttagccgctggcgccgccgccctgagtctgacccggcgctggcgttcgctttttatccgcaggccgctggcgatctcgttgccaaatgcccggaggaagccgcgccgctgctccacctcccgtcaccgggagagccgccgaggctcctgctgcgaccgcccttctactgctcgcccgatcaggccgaaggactggcgcgtggggaacagctgcgcccacagcttgccgccctgcgccatgccgggggacacggcgagtggcatctgttcgacggcagctggcagttgaccctccagctgccggagccaggccgacggccggaggcgatcctgcaggccatcctgcggcagctcgcgctcccggtcgcctcgctgaccccaccgccggaaagtatcgctatccgttatctcatggctcaactccccgaacggctgggtacatgcgggcatcagaaaggttggctggcggccctggccggcggcagcgcagaagatgcgcagtggatagcgcgtcagctgagcctgattaccgccccggttaatccgccgatgcccgctccggcgccctgccgccgcggcgtcgaacgtctggtttatccgggaggcgatacggcgctgctggtctttattccgctgccggatggcgcctcgctggcggccctgcggctgctggcgcagcattgtgagccgctatttttccagcgcctgcgggtggagcagcagattggctatgtggtgagctgccgctatcagcgggtcgccgatcgcgacgggctgctgatggcgctccagtccccggatcgccgcgccggggaattgctgcgctgtggtaaagactttctgcgccagctggcccccatggatgaggcgaccttcagaccgctacagcagcgcctggccgctcagatccgcgccagcaggccgccagaggcgcgggcgctgtccgccctgcgtcaggagtatggtttaccagagctaacgccgcaggcggtcgacgcgctgcgcgttgcagaggtggccgatctggcacgcgaaatgacccgccggcgtcgccgctggcaggtgctattcacgacaggggattaatggccgggggcatccggggtcagaaaggcgctgacgaagcgcgtaaggatcgccgcgccctgcgggctctcctgcacctcttcgtgtaaccgctgcgcgtcaataccttccgcctgcagcaccgcctcccggtggcggatcagcgaacgggctatcggcgcggtaaattccgggtgaaattgcgtagagaccgcgtgaggcccatagcgcacaatctggtggggatcgtgggcggacgcggccagcaccgtggccccttccggcagacgagtcacggtttgcaaatggctcagatgcgcaggaaatgtagccggcaggccgctcagcagcggatcatcgacaccccatggcgacagcgtaatggtttggctgccgctttcccgcccgccaggatgatacgccacctcgccccccagggcatgggccatcagctgatgaccataacaaacgccgaacagcggcatgtcgatagccaccgcctgccggatccagtcggcggtccgttcgctccacgccagacgatcggttaccatcgcccacgagccggttagcaccgctaaggtttggttatccggcgtcggcagcggttcatcttcaaacacccgcaccgtggtgagctgcgtctgccacggcgccagcagcgtgcgaaaccagcgcggcagatcgccatgcgcctggcgaatggccgtcggcggcgtgccggtctggaccagcagtaatcggttacgtgtcacctttcctcctcgctccgggtcatgttcccgtaaaacactatgccgccgggaagacgatgggacaaataaccaattactatggacgatgcgcctgcggaataagtcctgtcgcttactgggcatcggcgctatcacgctgcggcacatcggctgccgccgaagatgcctgctgcgggacaaaaatatggtccaggatggcgcgcgccgtcggtccggccaccaccccatccccgccgccgttctccagaatcagcgccatcgccaccttcggatgctgataaggggcaaacagggtgtagaagatatggtcgcgcagacgcaccgggatcattttggcgttataggtctggttttgcttcaggctaaagacctgcgaggtcccggacttcgccgcgatctgatacggcgcagtatgaaacagcttatagccggtgccgttgggctgattcgccatcccatacatgccgttgcgcacaatgccccagtacggggatttcgggtcacccacctgcggcaggttcgccggctgctgataacgttccacatggttgccctgcttcatcgaatagagcagatgcggatcctgtactttaccattgttcagcagagtggtaagcgccttcaccatctggatcggggtggcgatccagtacccctggccgatgccgaccgagatggtgtccccctgataccagggctttttatgcacccgctgtttccactcccggctgggcagcaccccggcgtactcctcattaaggtcgatgccggtggactggccgtagccgaacttgctcagccattcatggatccggtcaatgcccatctcgaaggcgacctgatagaaaaaggtgtccgctgactcttcgatggctttagtcacgttgagcatgccgtggccggttttcagccagtcgcggtagcggcgttgcgtgcccggcagcgtccacgtcggcgccccgaagaaggtggtgttcggggtgatgaccccagcggagagcgccgacagcgccatatagggtttgaccgtcgaagccggaggatatagcccctgggtgacgcggttgatcagcggccggtccggattctccagcagcgatttataggcctgatagccgatacctttgacgaacggattaggatcgtagctgggactggagaccatcgccagcacgccgccatcccgcgggtcgaccaccaccaccgccgcccgctgtcccttcagcaccgactcaatatactgctggagatgaaggtcgagagtcagatagaggttttttccggccaccggcggcacctctttcagtagacgcaccacccggccgtggttatccacctccacttcctgatagccggtggtgccgtggagcgctttttcataatagccctcgatgccctgcttaccgatattgcggtcggcggcgtagttctcctcttcgccgtttttcgccagccgctgcagatcgctgtcgttgattttcgacacatagcccaccacgtgcgccagctctgcgccgtaggggtattcccgttgttggtagctctccaccgtcacgccggggaaacggaattcgttgaccgcgaagcgggccacctccacatcgctgaggtctgacttgagggtgaccgctttgtagcggctggtgtggtgcatatcgtcgcgaaagctggcgatgtcgtccggcgtcaggtcgacgataggcgtcagctgctgcaacagcgcggccatatcgtgaattttgctcgggatcacctgcaggcgatacagggtgatattctgcaccagcggaatgccgttgcgatcgaatatcagcccgcggctgggggcgatgggcagcattttgatgtcgttctggtttgaccgggtctggtaaaaatcgtgctgctccacctgcagatggtagaggttaacgatcagcacgccaaagcagaccaccaccagcagaaaagcaattgcggcccggcggataaacagcatctcttccgcggagtggtcgcgaatttcgtctctcaaaaggggcattagcggtacatcacctgaatcactggaaaagccaacggcgtaacggccgggaagcatagccttatcgcagcgtcagccctactgaaaggttgctaatgatctggcagaaatgtttcagcatgttagagggatcgttattcttaaccttgcccgtgacgcgtcaggctatattcacgatgcccgacgcgtcggcgcagctcactgttctgcgcgggccgccacgtgggaggtagccgacttccctgaggtatagattaagtacagcgcgagggccagacatatcaccgccgccagtcgcgccggcgagaacgccatcgtgctgttgcccagccagccaaagttgtcgatcagcaggctcatcgtcagctggccaaagatcaccgccacggtggccgtagcggtgcctatccgctgcaccgccagcaccataatgacgatgtagggcacgccgcaaaatgcgcccagcagctgccacttaggcacctgtagcaggtttaccgacgtcgctggagcaaaaaacaggatcagcaatcccgtcaccagcgcgccggtggcgaaggttaaaaaggcgctgcgcagcacccccacctggctgccaagacggccatttatcgccgcctggacgctaagcaatgcgccgccgcacagtgccagaatgatcactatcgtatccatttcccctccttaacccagagccaccagcagtaacgccgccataatcaacatcagcgccatggcgcgccgcggatcgattttgcgccgtgggctaccgaataacccgtaatggtcgatcgccaggcttttcgcaatctgacccgccaggatgccgatcatggtcatggcaataccaatcaccggcgtcgccacagtcaagatcaccacgtaccccgcccccaacagaccgccggtgagttgccagccgggcagagaaaagaacgacgggctgctacgcgggctgaaaaagagcatcagaaaaaaggttaacactgcgccaatcccaaagatgctcatggttgcccacagatcccccacctggctcgccagcggccccagcaggccggcctcgaccgataatcccatgccgccggcaatcactaataaaatgaataataacgccattactgcgcctcctctgtacaacaggcggctgaggataaaacagcgtgctgatgcgataaacggtataatgcagaaaacactattgcaggaattgcacagatggccgatgccagcagcgtcgattttcgcgcccttcagcttttcatcgcggtttacgataaccagagtttttccgtagtggcccgccgcgaaggggtctctccctcgctgatctcgcgaaccatccagcagctggaagatgccctcgggcagcagctgttctaccgcaacacccgtgccgtggtaccgaccgaagcaggacgccttttcgcagcgtccgcccgggaactgctgggacagtacgccgacgcgcaacgggcgttacaggatcgggcacaggtccccggcgggctggtgcggatcaatgcgccggtctattttggtcagcggcatatcgccccctggcttccggaactggcggccctgcatcccaaactgcagtttgacctgacgctgaccgacgattttatcgatccccatcgcgatgcgacggatatcctttttcgcatcagcagcctgccggacgcgggctatcacgccagagtgtttggcagccagcgctattacctgaccgcctccccggagtatgtttcacggtacggcagcccgacttcgccggaggcattgcatcaacattgcacgctggtgtatggcggttcgcagggagccaaccgctggctgtttcgccagcgcgaagaggcatgggtgcactatccgttgaccccgctcatgacctcgaacaatgccgatgccctgctcacttcagccatcggcgggatggggatcgtgttatttcccgactggatggtcagcgaggcgctgcacaacgggacattagtcacgctgatggatcgctattcggcggccatcagccacacgccatcgtatatcgcggcgatttatccttatacccgccatccctctctcaacgtgcggacagtgattgactattttgccgacgtgtttggatcgccgccctactggcagcgctaatgcgagtttcgtagtaaaacttgtcatatctcaaacaattagcatttcttcgcccagcttgacgcggatcgtttcctttgccgcctcgttacggctatggttactaatgaggttaatctcaatctccaggccgacacggtcccaccagggggttgcctaacccttcattgaacggaaatagctattaaatccgtagattcattcaaatatcgcttattggtagcagtgtatatcgtaacggcattcacaaaagcaaacggagcctgatatgagcacgtctaacgacccatccaacaatgcatccgccgggaagtgccctttccacgccgagacgccaaaacagagcgccggcagcggcaccgccaaccgcgactggtggccgaaccagctgcgtgtcgatctgttaaaccagcactccaatcgctccaacccgttgggtgagaattttaactacagggaagagtttaaaaagctcgattactccgcgctgaaggctgatctcagagcgctgctgaccgattcgcaagagtggtggccggcagactggggtagctatattggcttgtttattcgtatggcctggcacggcgccggcacctaccgcaccgttgacggtcgcggcggcgcaggtcgtggacagcagcgctttgctcccctgaactcctggcctgacaacgtcagcctcgataaggcccgccgtctgctgtggccggtgaaacagaaatatggccagaaaatctcctgggccgacctttacatgctggcgggtaacgtcgctctggaaaacgctggcttccgcacctttggctttggcgccggtcgcgaagacgtctgggaaccggatctcgacgtcgactggggcgatgagaaagagtggctggcccaccgtcatccggaaagcctggcgaaacaggccatcggtgccaccgaaatgggtctgatttatgtcaacccggaaggtccgaacgccagcggcgagccgctgtccgccgcggcggccattcgcgccaccttcggcaatatggcgatggacgatgaagagatcgtcgcgctgatcgccggcggccatacgctgggcaaaacccacggcgccgcagaaaccagccacgtcggcgccgagccggaagccgcgccgctggaagcgcagggtctgggctggcactccagctacggcagcggcgcaggcgcggacgccatcacctccggtctggaagtggtctggacgcagacgcccacccagtggagcaactactttttcgaaaacctgttcaaatacgaatgggtgcagacccgcagcccggctggcgcgatccagttcgaagccaaagacgcgccggagattatcccggatccgtttaacccggagaaaaagcgcaaaccgaccatgctggtcaccgacctgaccctgcgcttcgacccggagtttgaaaaaatctcccgccgcttcctcaacgatccgcaggcctttaacgaggcgttcgcccgggcgtggttcaagctgacccaccgtgatatggggccaaaatcccgttacctcgggccggaagtgccgaaagaagatctgatttggcaggatccgctgccggcagcgacccatcagccgagcgcggaagatatcgccagcctgaaaaccgccatcgccggcgccggcctgtcggtcagtgagctggtctcggtcgcctgggcgtccgcctccaccttccgcggcggcgataaacgcggcggcgctaacggcgcgcgtctggcgctggccccgcagaaagactggccggttaacgccatcgccagccgggtgctgccgaccctgcaggcgatccagcgcgcctccggcaaagcgtcgctggccgatattatcgtgctggccggcgtggtcggcgttgagcaggcggccgctgccgccggcgtcagcgtcaatgtgccgtttaccccaggccgcgtcgacgctctgcctgagcagaccgacgtcgagtcgtttgatctgctgcagccgctggcggatggcttccgcaactatcgccgtatcgaaggcggtgtctcgacggaaacccttctgatcgataaagcgcagcagctgacgctaaccgccccggaaatgaccgtgctggtcggtggcttgcgcgtactgggcgcgaactacgacggcagcaaacacggggtgtttaccgaccgcgtcggcgtgctcagcaatgacttcttcgttaatctgcttgatatggctaccgtctggaaagcggccgatgataacgcggagctgtttaccggcagcgaccgtaaaaccggcgaagcgaagtacagcgccacccgcgtggatctggtgtttggctccaactcggtactgcgcgccctggcggaagtgtacgcctgcgccgacgggcagcagaagctggtgcatgacttcgttgccgcctggaccaaggtgatgaacctcgaccgcttcgatctgtaatcccctcgccccggctcccgccggggcgtttttcttataccgcccgcggcagctgttgcaggcgactccgcgttcgttgaatatcctccagttccacccctgccaccagcgtctccaggtcgcagcgggtcaccagcagcaggcggatctgcttttcatacagcacatcaatcacattgataaagcgctgctgggtcgccggccccaccgtagccaatggcggcacctcgtccagtagccagacggcatagctttcgcagagcgtcagatagtccatcaccgccgtggcggcctgacaaagctgggtaaaggtgaagtgcagcaacgcgggcgacgccgcggccgccagcagcgtgcgatagcctaccgtcagcgaaaccggttcgccaggcagcgacggcaggtcatacagctgacgctgttgtgcattcggattaacccacatccgcccgctgcagaaggcgttatcctggctcagatgccgttcgcgataatcttcctcgccgttcagcgccaccaccgttagatgggcgcggatcagcgcgatcgacggtaaaaagcgatcgtgatacagcggattgggcagcagcatctccggcgggtagtttgaggtggccagcagcacgataccgtgttgaaagaggtgttccagcaaggctttaatcagcatggcgtcgccggggtcgtgcagatgaaattcgtcgaagcatagcaggcggcaaccggatgtcatctgcctcatcaccgtctgcaggtcgggcgctccgggggcattcagccgctggtgcagttcgcggaagaagtgatgaaaatggacccgccgcctggcggcgagcggcaggctggcgaaaaagtggtcgaggataaagcttttccctcgcccggtacgtccccagacgtataccccctgcggcctgcctgtcgtggacaccaactgctgaccgagggcgtcaaggcgggcgatgagtgacagctgatcgtcgtccagcgtcagacgcgcccgcgccgcctgctcggccatcacgcgggtaaaacgaaaatcagccgtcacctctgtgggaccagattccgagggtacacatccattatttaacattcttataacctcctgcgaggaggccattctagccgctttcccgcgggatggcgaatcgcgcgacgagcggccatttccgctgctccgccgccagcccctacgcctctccgacacgccagtgcaccgatgtgacgttctgctgaacgcccatttgcgccataatttgcgccagcgttttttggtgctgcttatgactaatcagctgcgcgcaaatctccagatggtccgctgtgtccgccgccgccgactgcaatccctgcagggtaaaccgctgctgctgcgcaatattcagcaacagctgacgcacggcattttcatgttcgcgcagacaggtgacgcgtaagacatagcgtttctcttcgtcaccggcccccggcaaggcatgaatgcgctgcgccgcctcgcgcagcaggatattggcgcacagaataatcagcgtagccgccgtcgcgttccagaactgtcccaggccgcagagtacgccgatcccggccgaacaccacagcgtggcggcggtattgaggccgcggacgttcataccatcgcgcataatcacccctgccccaaggaagccgataccggagacgatctgcgctgcaatacgccccgggctgtccggcgaggccgacatcgcgctgagaataaacaccgccgcgccggtggccaccagggcattggtgcgtaaaccggccatacgttgtcgccactgtctttccgcgccgatcagcgcccccaacaacattgccgcgagtaaatgtgtcatataaggaaataccatcgcgccttcctccagaaaacagaaagccaaaaattacagatgtagcgctcagccgcgccgggcgattagccggtggatgatggtggaggaaataagggtctggaaaacataaacataacgctgcctctcgcgctcaatggcgcataaattattgagggaggcaatccggaactgagagattgctgcccgccgggacggcaagcagcgaaatgatcgcgttagcttgccggaaaatcgcaataagggtgactgtccaacgtatgactcctgaataaaagtgggcacattatagcccggggtaatgatgggtaaagcacgaaaacgccgccggtgacgattcgtttagtttgtctttcgcgggtcctgcgtagcgtgacatcgccaggcgactaaaatgccgtcagcggtgatttacttcaattccttcgctgggatgcggcgaaaaccagcatgaatatcaactttatgtctccccagcgcgatcttacgctaaagaatgtcgctaaggctaaggattaaaaatttaaaactattaacaatcaattaacattagcaggcaaaccattcttcctgaggaacacaacaccatgtctaccacccaggttctcggcgaaacgccctatgcttcgccaggacaaccgcacgccagcttaaccggacgcattgatgcgctgcccgcctcatttgggttatggtcgtttattaccctgctctcacttggcggcttctttgagctctacgatctcttccagaccgggtatatcagcgcgggcctgctggcggagggcattttccacaccggacaggcgggcatcttcggcatcgccgaccaggcggccttcgcctccgccacctttatggggctgtttatcggcgccagtctgctggcgccgctggcggacaaactgggccgccgcctgacctttatggtggcgctcgcctggtacggtcttttttcgctgctgatggcgacgcagagtagcgcggaaggggtgatcttcttccgctttctggtggggatcggcctcggcattgagctggtgaccattgatacctatctcagcgaatgggtgccaacccatctgcgcaataaagcctttgcctttgccttcttcatccagttcctctcggttccggcggtggcgctgatgtcctggatgctggtgccgaccaccctgttcggcctcagcggctggcgctgggtgatcatctttggcgcactgttctcgctggcgatctggtttatccgtaaaaagctaccggagtcagcccgctggctggaaagcaaagggaggcatgatgacgcgcatacggtgatgtgtgagatggaagcccgctgcggcctgacgccgtcgccaaagcatgcgcatgcggcacagagcgtcgtcaaacgcggcaccttccgcgaaatctgggcgccgcagtatcggcagcgcaccctgatgctgatggtgatgaacttcttccaggcgatcggtttcttcggctttggcaactggctgccggcgctgctctccggtcagggcgccagcatcacccatagcctgctgtacgccttctttatcaccctcgcctatccgctgggctgtctgttctgcacccgcttcgtgcatcgttttgaaaacaagtggcagattgtcctctccgcgctgatgaccgttatcttcggcaccctgttcgctctgcaaaacagtccgatcctgttggtgatctgcgggtttatgatcacctggtccaacgcctggctgaccatcagctaccacgcctaccaggccgaggtcttcccgacccatattcgcgcccgcgccgtcggcttctgctactcgttcagccggctctcgaccgcggtgaccagcattctgatcggcattattctgcaatacgccggcacgccgggagtaattagctttatcgtcgtcagtatgctgatggtgatgctgtcggtagggatcttcggcccgagaacgcggggcattcgtctggagaatatctgatggcggtcgccgccgagggtgacggcggcgacatattttatcagttgcgatgttgcagctggcgctgaacctcaataagctccgcgatcaactcccgcgcaagcatagaggtcattatatgatcctgggcatgtaccagaataagattaaccggtactttgccacagccctcatccataccgataagcatggtttgtacatcatgcgcgcgttttgcggcatctgcggcgtcctgcatcagcctatcaacgtcctgccacactccttttctggcggcttgcagcgcctgcatcgccagactgcgggactcaccggcgttaatgatgagttccatgacggttgcttccatatccatacggtttccctacttgttaagtgaaggttcatccagcagcgccagcgccgcagcaagaattttatcgccacgcatcatgccgtaatccatgctatcgataacggcgactctcttgcccaccgcagcggcctttttgttaaattcttcgaatttatatttgatctgcggccctaaaagacagcaatcgtaatttggtaacgtgcgatcaaaatcatccattgaaacagcaataatatcgacagcaatgccttgcgccgcggccgcttgtttcattttattcattaccatgctcgttgacatgccggcagcgcagcacaaaaatatttttttcatcttatttacctgttcctgtaacgtattattgatgcttatctttgagattttggtctaaaaaattaataataatttttgatacttcaggctgataccacatcaaacctgcgtgatccgcccctttcaccacgtaatgggtggacggtatttttttcgctaccagcgcctcgtgtaaaagcgttgactggctgggtgaaaccacattgtcggcatcgccgttcattagcagaaaaggcggcgttttattcgaaatccaggtgataggattagcccgtttcgccttttcgggataggcggagatcgcgccaccgccttgccagggaataccattaaccagcatcgcctctggtatggccggtgactgatgcgctttttgaatgaccgcggaaaagtcagccccgactttcgtcagatcggacaggccatagagatcaaccaccgcctgcacatcgctgctttgatttgaatactctccctggtcgaattccttatggccgctggtggtacccaccatggcggctaaatacccacccgccgactcgcccatcacagcgatatggttgggatcgatgcctaatttttcagcattggcgcgtaaaaatctgaccgccgttttcgcatcttcaaccatgcccgggaaagtcacattgggtacgacccgataggtaatgctggcgacgacgtaaccggcccgggcaatatcgacccgctgaccgatgaattttgatttgggcgcatcgagaaagccgccgccggtaataaatactactgcgggtaacggtttatcagcataaggcttgagcaaatccatcgttaactggagcggtcgtcccatgatattttgcgtaaatgaataggcaatatcaggcaccatctcgacggccagagcgctgggtttaataacgatagttttgctgtctgttaaaggtgtttgtgcaaaagcagacggaataataagcatcgtcagcatagcagcgacgtgtttgttcatagggtaatatcctgtagtgatgtagtaatgattcagaaccagacttccattcgatacccgactcgccactccgagtcttccggcaataacgtgacctctttgtccccgcctgcgtaggtaaccgtcaaactgagaatcggcgcgacatacggtaaaacatccagttgcagggccgggccggcggcaattttgtagccgacgccgctggcaccttcgacgccatttttattgatagtgttattcaccatgacttcatacaacatggagagattttggtgatgaatgttttgtttaacgtttacgccggtaaagatcccggtttcatttgcggaaccataggtcatgtcccccccctgaataacctgtatcaggtataaaggtggttcggtcagcagttttttcacgcttggtatattcatagatgaaagccggcgagacggcaaaatcatcaaataacgtcaagtttccgtcggtggaaaaacgcattgaacaatcgccctcttcgctaaggacggtaatacgactggtgttcagataaggagcaataacccctttaccatactgtaatttgactgtcgattgtccctttgccactccccaaaaagacggcatgctgtatttcgcggaaaaactaattgctttctgcttgccagtgcccaacgggtcatcaatttctttaacataggtcatacccagctctgtctgatcgatacgataagccatatcaacgatgcgccgcgagccttctatcgcctgcggcgcggtatcgctggaccagtcgatctggtcggtaccaacgttcaaatcaaaattcttactgttataaccgaggccggaatcaatatgtacttctttggtattgtaagcgaagatattaatacgttgatcgaggtaacgacgcccagcccaaatgtttgcgccctcgggaagaaaagagagcccaccaaagcgcccataattctgtgccgtttctaccgttttatcgccgtaacccaccatttcataggtgtaatcagcccattgctcgggagaagccagcccctgccattttttagtgatagccagcgatgtccagtaatcgtgccagaaactgtttcccaaatcgcccattttgccacgaggatcctgattaggtccggtgggatcggtatgcaacgacatgtttttgggacggtttagttcgctctgaaaatctccagccaccatgccatatccatttaactggaagctgccgtcgtcgcttagattggccgcatggcataaggtcgcaggcagaaaacatgagataacacctgaaataataattctggggttcattcttcagactccatcgggtaagagatataaaataaataaaattattatttttattgcttatctgattttatttaaagaataccacccgtgttataacccagcttgcctttttatatatcggttgttgccgattttacttattacaaaaacatgcaatagcaggaacgctgtgagccaatttactattcaggagttcagatcacgatactccttaatactcatattatatttctctttaaataccttataacaatgcgaggcgttttcataacccgtcatattaataacatcaataatagagtgattagtatgcttaaggagatggatcaacacatccaggcgtttttcaaccaacaaatcgctaaagttcttaccagtgaagtcttttatcagtttactcaccttataattaggctgatttaaacgacaggagatctctttcaggctggcagttttataatcggtatcaatatatctcaacacggccatggcaagtgattcattgtaactgccgttgatatggtaatcgctggcttgcacattcgagagcagttcggtcatcaacagtcccaccaggaaattgacgcgtatctcttttaagtggttattactgtagatctcgctaatgatgacatgcataatgttttgaattgcgtcgatttcccccactttaaagtgaatatgctctccatgtttttttctgccattaattgctgaaaggataaaacgggaaatgatgttattttcgtcaaaaagggacatgagtcgaccgaaaaattcggtcttaataataaaattgatgataatatcattctgccctgcggcttcaatttcgtgtctggcaaactggttgataagcaggatctcccccttacctaaagtgagactttcttcattaatcttctgatgcattttaccctgatatatataaataagctcgataaagccatgagaatgcaacggaattttagtaaatcgggtctgcttttcaatatgaatgtagttgtctttgaaaaaccttcgctccatatggcttttgaatttatgacacagttgatagttagcgcgaagcagttcgagttctctatcggtataagccagtagcttttcatgaatatcatggtgtaacataaaagtacctaactggagcgaacgtttgggtatgcactatcattacaatagtacttttatctcacctgcatcggtaatgtcataaaagtgatgataggtatcacagtctatcggcgcaggtaattgtttattaagttgatacacttttggtaatttaagagtgcattttttgaggttaaatggcactttgatgactaattctatgccttttttatagcgccgccagcgacactcaatacgccctctgatggtttgatgccagcaatccacaaagttaatcgtgtcagtaaaggatggactgattaaaataacatcagcaccaaccgcctcctcagcgacggtaatgccgcccaaagcctgaaacagccaactggaataagaactgaacatcgcatgattattcgaaccattcaggttatcaccgaaaaattccttcaatgtgctggcatcatttttaagcattttcttgaatccggcttcgactcttaaccattcaaggattaattcattatgaccatagcgatgaaatatttcataggcaaaactttggccaaaaatcccacaagtgataacattttgctcttttttgatgagatcgatcaatgcattcaatgaactctcgatatcatcacacaaatcgaagtagattgcaaaaacaaagctggtctgactgcgatcggcaaagctgccatccgtattcttatagagtgataaaattttctctctaattttattggccttgccaatatattttagccatttttctttaaagccaagatcatcacatatttttgcgataattaacaaatgataataatagaaacaagcactggtgaaatggagagctggcgagccatttttgtaattacgcatatcatgaacgcggcttccccagtcacccaggcagcaggtcaccaggtcatcaaagtcgcgcatttccagggagaggatctgcttctcaagaaatggcaagctttcggccagcagattgacattgccataatgtcgatagtgaatggctatcaaataaggtaataccagttgccagcccagggggcccgtttccccgccgactccattagtcttaattcccataaatggcgcagtttccgtcacaccaccacagggacgaatatcattgataaaatcaaagatagttttcttataaatagcggcagagtcaaactgatacacttgcgaccgggccaacgcgacaatgtctccgccataggcgaaacgttcgcgggcacaatccccgaagaccgaatgaatgttattcagtttggttcttttagcaacctcaaagagcttatttatgtaaggatctgagcagtaaaagcccccgttttcccttagtactgtatgtactgaaagcgcctgaacgttgtttaattgttcaatattaataccgcttaactgcacatagcgaaacgaatgacaggtaaaggcattgataaaatgattcttcccactgcggcattcaaaggcatccttctgctccgccctcgccggtgctccaattccgccgtcaataatcacaccttcagtaacctgtttgccgacaaatcccgcaagggtggagtcagtgtttagttcgtagttttcatcaacgttttcgctatagagcagttccacacgttgattctcagacgcggtaatggataaatcgataaatccggtgacgatggcaccgaaatcaataatgaatgtctcttcgtctacgacgtggatatgctctgcccgagggacaacgtatggttaattttcggaataaaactcgagaccagacggccttcaggcccgttgctcagcaccacatttttccagtcaggcatcagcaaatcggtggtgttgtctccgcgaaacagtttcatatccaggcgttcgcccaaatagatattattgaaggtataagcgccttcgcaatattgccagtcggcatcactaccgatgatcatttcgcgatctgcaaacctcatataaatgtcagcgatgacctgtggttcaccgatggttaaggtctctctcaggttatatttaccaaataatttaagcggtgctggattaaaccagccatcggctagctcaacaatgacttcatttttcggctgattaataaacggctttatattgtaagtatcataataaataattttagcataatttgtccagtcagtattgagctcaccgcgtgtgacctctttaccgttgatatacaatttataaaaaccaagaccaacaatactgatataggcatcgaggaggtcttcgtcgagataaattttttttctcatcaccacattacgtttaccgcgatagtaatgaatatcattagtgaagtgatgcccaccgctcacccagcggccagaaaaatggccaagattactggttgtaaaactgtttctgaaaacgttgttctcaccattgtcaccgtgggtaaggacttctatggtataagaagtaaagctttgtaacgatattgcatcgagagtgacaattgtattattaccctctcttgcgataagagataccagttcggcacctttatacacttttatcgaaaatgacttttgaggataattggtagaccagcacaccataattggcagatgatcgacaataatgttttccgtttggtaattgatacttaacatctttcccaccatggctaaattggcgttgctggcatttttttaaggagcattcaaatggtatccgtctgattttcttcccggcaagcgacaagatcggcagtcttgaagaagaaataccatcctgcaaatcgcgcaaaaagtcctataaattggaaagcggcaattttccagctcccctgcataaaaccagaaataatgatcggcatgccggccggggtactcaccccagcgacgcgaggcaatacgccaatgaccgttagataccatgcaatgccgagcatgatgccattgataaaaatataaggaatcgccagagtaaaattcattaccagcggcacgccataagccatcggttcgccaatggtgaagatagctggcggcaaggcgatcttaccgagcgttttatagcgtgcgctcttcgcgaaaaaagcgagcattatagccagcggcaataaatctccagcagcgccataagtcataaagaacgcaaagccggtgatgttgggtaagtcgacgcctgcagcatacgcagcaagctgctgggcatccatggcaaaccagatcggcgctacgataccgagggtgatagcgtggccatgcagcccaaaaaaccatagcaattgcgcaacaacagcaacaaagatgagtgaccagattccggatccaagtgatgttagcggaacctggattaatttataaataatttcgtgaatgctcccataaccaacgctggtaatgactgcggagataattgtaaacagcgtcaggatggcgattcctggaatcaatgaagagaacgatttagagataaattcagggacattttctggcattttgataatcaaccccttgcgagttatcgccacgaatattcgtgttgaaattatcgccaccagaatggcggtaaacagccccatgggccccagccattggccagggattgaaaatgattgccctaacggccctatttcaccgagatcatacggcgttaaaataaagaaagagatcattgaaatcaggcctgacatgaagccatcaacatcgaaatttttcgctagcgtataggcaacggagaaagcgacaatcacggctaaaaaattattcgtgaaggtaatcgggatatcaaagaagcgagttaagttgtgtcgtaacaaaaaatcctgatatggagcaaacggaaacactttaaccaaagtcgccacagaactcatgatcgttactggcaatatgagcatcataccgctcatgattgacttaaggtaggtattttgaccaatactttgcatcagttgcaaagccttttcttgtacaatgttggtatgagatgacatgtaaacagtccgtgatattattagttttcagacatattcatttaagaattcatatgccggcatgacattaatgcatcataatctaaccaggaagtcagcctaatatatcattagggagtaatacatatcggttgttgttaacttaaatgacggctgttgccatagttaatatttgtgatgtgtactgcaggagggataaaaaattgtcattaaggcttgtaacttctggacagcattaagcggcgccgcaataccacttttaccaacggtccagcatcaccggggctatattgacactttcccatcagaggggcgtttaggcattttagtgacaagccgccaggtcggcggcccggcctcagccaaatatcccctgcgcctcggcgaagcatttttccgccagggtcgagactggttcctgctggcgcataatcagcgccagctgtgaatcaacatgggtttcggcgatcggcagaatttcaagattatcgcttagcgcttcgaggccgttgttaagcggcataatggcgcagcagatccccgcctgcaccgcctggataatctgaaacgtcgaatcactttcgaagacatacctcggcgttagccctttggccttaaagctgatttcaatcgattcccggtaatacatccccttggtcaaaaagccgaggggcagcgtcgccagcgtctcccatcccggcgtcccggcgctgaagtcgaaatggcgtttatcgtgcaggagccccatccgggtttgcggcaagcgagcaatcttgaactgaccttcatccagatgctgcagataacaaatccccagatccagctgattacggctgacgccatcgataatctgctccgaggtcatcgacaacaggctgaactgcagcgccggatatttctccgccaggggtttaatcaactgcatcggattgaggctcgccagcggcaccataccgacccgcagctggccgaccatctgcccgcgacagatggccgcctctgccgccaggccgtcatgagcggccagcaccgcccgcgcccaggccaggatccgctctccctccggggtaaaaccttcaaagcgttggccgcgctggatcagcgtcaggttcagctcctcttccaggttacgaatgcgcatggagagcgtcggctgggtaatatgacaggccgccgccgcctggccaaaatggcgcgtctgatcgagcgcgatcaaatacttgagttgcttaatatccattctctttcccgtttgaaccccgccgttcacccccggggccgcgcacaggttaccagaatgttagtttcgctagcgataaattcaagcgaggacaccacgaggtgctgcggggcgcaggacggcgcgacgccgctctgcgctatacctttttagcgcccgccggccagcggacggatctctttcgagcgcagcgtcagacgaacgggaaccgacttatatgaaggggtgccgctctcttcatcgagatagttcagcggcaccagcacgttggcttccggataataggcgccgacggtgcccggcgcaatgccgtaggccaccaccgtgatatcttccagcgtcagcgcgcttcccggcagcgcggtatgaatatctacccgatcgccatgctccagaccctgggcggccatatcctgctcgttcataaacagcacgtcgcggcggccaaagacgccacggtagcggtcatccatcgcgtagatggtggtgttgtactggtcatgactgcgcagcgtcaccaggcgcatcacgtcctcaccctccaccaccacgttctcatgcacacctttaaataccgagaacatggctttaccggtggcggtaggccagatgcgctcggtcggcggcagcggcatgcggaagcctccaggatggcgaatgcgctggttataattctcgaaccctggaatggtctgttcgatcagatcgcgaatgcgatcgtagtcttccacgaggtactgccagtccactttgctggcgggcaaggtggccttcgccagaccggcgacaatcgccggctccgagcgcagcatcggcgaggcgggcttaagcttgcccgacgaagcatgcaccatcgacatcgaatcctcgacggtgatcgactgccggccgctggcctgcaggtcaagctcggtgcggcccagacacggcagaataaaggtctctttcgccgtcaggagatgtgagcggttgagcttggtgccgacgtgaacgctgagctcaaggccgcgcatcgccgggaaggcgcgttcgtggtccggcatcgccacggcgaagttgcccccaaggcagatcagcgctttggcatcgccggcgatcatggcctccagggcctttaccgcatcgtggccatgatgccgcggcggcgtaatccccatcacccgctgcaggctgtcgaggaaagccgcggagggtttttcgctgatcccgacagtgcggttaccctggacgttcgagtgaccgcgcaaaggacagatcccggcccccggcttgccgatattgccgcgcatcagcagcaggtcggcaatcagacgcacgttggaggtgcctttgttatgctgggtgatgcccataccgtaggtgacgatggtggccctggatttggcgtaagccgccgcaacctgggtcagggattcgcgcgtcaggccagactcctgttcgatgtcctgccagcgggtggcgtggaggtcatcggcgaaggcggtgaatccctgggtatgttgggcaataaacgcgtggtcgagcacattgccctgctcctcctccagctgcagcagcgctttggcgatccctttcagcgccgccgcgtcgccgccggcccgtacctggtagtaggtcgaggcgatcggcgtcgagcgccgggtcgccatctccattacgttctgcggatcggcaaaacgctccagcgcccgttcacgcagcggattgaaaacgataatcggcacgccgcggcgggatagctcatgcagggtgcccatcatccgcgggtggttggtgcccggattatggccgatggagatcaccagctcggtctggtcaaaatcgtcgagggagacggtgcctttaccaatgccgatcgactgtggcaggcccacgctggtggattcatgacacatgttggagcaatcggggaagttgttagtgccatactcgcgggcaaacagctggaacagccacgccgcttcgttggaggctcggccagaggtgtagaattcaacctcatccggctgcaggccgcggaggatctcgccgatacgggcgaaggcttgctcccacgccaccgggcgcagggtatcgctgtcccggtcgtaaaccaaaggatgggttaagcggccgtagccctccagttcaaaatcgctttttgccagcagggaagatacggtatttgccgcgaggaatgcgggcgtcacccgtttggtggtcgcctcccaggtcacggctttggcgccgttttcgcaaaactggaaggtcgatttatgttctttatccggccaggcgcagcccgggcagtcaaaaccgtccggctggttggtacgcagcagcgtggcgggcgcctcaaaggcatccatctgggtgcgcacggcgatggccgtggccttcaacgcgccccacccgcctgccggaccgtcataggggtgaacaccgggaaccgcgcgtcttttattggtcatctctttactcctgctgctctgttctggctgtctctagccgaaaaaggcgtacgacaaccccggcgacgaagcgtgaatcgcattgcgtcacctgaaaagaatgctgtttctcaaggatagtacgatgggaaagcgtaggtactgcgtttgttaactgaataataacatacaccacaattctgtataattgatgttatctatcaggtgttaaatttaacttatttgcaaattttgcggttttcaccgcggtgctgtgacggataaattgctacggaaagtgatgaccgggcagcgaaaccgcccggtgggccaggctcaggtcagattgaagtaacggtccggacgcagcgtctccggcagcggatgctgaccggtcatgtcgagcagattgcgctcgatggtattgcacatcgcgttcaacggcaggtcattggctgcggtgccgaacggatcttccagctcttccgccagcgaatcccacgataaaaaggtgtaagagataaagaccgagacaaacggcgtcatgtagtgcagatcgccgaccagggcgaacggcagcagcgtacagaacaggtagacggtacgctgcaggatcagggtataggcgaaaggcaccggggtggtggccagcctttcacaaccgcccagcacgtgcgccagctcgtcgagtttgttgtccatcagcccgtaagtgatgtcgctgagcttgcccgcctcccgcagctggccaatttcgttgccggccagcagcaggatccggttggtgggcattgagctggcgaggatctccgtcaccctctcctccggtagcaaccgccgcaggtcagccgtcggatcggttttgcgcagctggtgcttcaggctccagctaaaggccaccagatagctgacgatgcggcgatgggcatcgtgttccgccggcaggatattgcgcagctgacgcaccagcgtgcgttcggcgataagcaccgtcccccacagattgcgcgcctcgacgaagcggctgtagctggcgctgttgcgaaagccgaggaaaatcgcaatcgcaatccccagcaggctgaacggcgccacggttaagtggatccccagctgttcgtaccattgatagctgataatggcgatgatcgacatcagcacatttagcagcaggcgaaagatgattttcgacagcacggagccgtgccagtcaaataggcgaagaaaccagtgttgttctggccgaatgatcattgtctgacttcctgaattaccgctctggtcattatctctgaatacagaatagagattatctatgagccgattggtttattttatcgttaactgcgatgggcagatctgcgccattatttagcgatggtaatggcgtttttagtatgggccttttttatatttcaggcaatcaatgcgccagcaataatggctcagaagaaaaaataaccgctgagccaattcatttttccgcttatgctaccgggtgtatcagaccgctttcgtcaacccctgcgcttcgcagggatcgagatgcaccatcacattaagcaccggatgctgcgccagcacccgctcccgcgcgtgatgggcaatctgatgcccttcggctaccgacatctcgccagccacctcgagatggacatccaccagcaccagatcccccgccttacgggttttcagatcgtggaggcccgccacgcccggcgtggttcgcagcgtatcggcgatcgcctgctgcatctcttcatcaaccgcacggtccattaaatcatgcagcgcgctgacggcgaaacgatagcccatgcgcgcaatcagcagccccaccgccagcgcggcgagcgggtcgaaccaggcgaacccggccagattaccgataatccccagggccaccaccagggaggatgcggcgtcagagcgggcatgccaggcattggcgataagcagcgacgaattcagccgcctggcggccgccagcatatagcgaaacagcccctccttgacggccagcgccaccagcgccatccacagcgccgcgctgtgcaccggcggaatagtttgcggttgcgcgagatggcccgccgcggaccatagcatgccacccccgacgagcagcagcatcgcgccgatgattagggaggcgccgttctcatagcgccagtggccatagtggtgatcgtggtcagacggtcgacggctctttttattcgccatcaataccacgccatcggcgaccagatcggaaaaagagtgcattccgtcagcaattaatccctgagagccggaaaatattcccacgactacctgtaaggcagaaaggaaaatattaaccaccacgcttacaagggtactctttcgcgcctgcaccgaacgctcatgatatttattatcattttcaaaattatgttgtgtcattatttctctccctttgtgagcgagaagaataaactgacaaactgagtttatgcttaacaatataaaagccattgccttgccgtttaacgatatcgcggcggtcggtaatgactatttactgtatgtgccgttggaacgctgcaaccttgcgcctatgaactatcttttgaagggtggccacaggtcgggccactttagcttagccaccacaggagtcagcgatgtcacataacaaaccatcccggctgcgtttcgccattaatctgggcaatgcggtcctggcccatctcggggagacaggaaagccagcgggcatcaccgtcgagctcagccatcggctggcgacgcgctggggcgtcagcgccgaattcgttccctatcctgccgcgggtaaagtggtggctgacgccggtggcgagcactgggatattgcctttctggccatcgatccggcgcgggaagccaccctgcgctttacctcgccctatatcaccatccagggcaccgcgctggtcagcgttgattcgccctgccagagcgtggccgacatggatcgcccggcaaccaccattaacgtcggacaaaacgccgcatacgatctatggctaacccgccatctgcagcacgccagcctgcatcgccttccctcttcgcaggaggcaatcgacgccttcctcgccggtgaaggggatatggtcgccggtatccgccagccgctggaggcgacagcccgtcagcacgccggggtgcgggtactggcggataattttaccgagatccagcaggccatctgcgtcgcccgggcggacgtggaccgttttcacgcggtaaacgacgcgcttagcgagtggcgggcggatggcagtctgctggcgctgattgccggtcacctgggccaagcgaactgaatcacgcctccgtcatccggcgcatggcgcaatgccaggcgccgttgcgtaccgaggcgcgcagtacgcgggccacgccatgcaccatcaggcgcgtcgtgcgccgctgcagcggcgtgagcgacaatcccagcatctcctgcgcccattccggcaaaaggtcaattcctgcgttcatcatcacccggccgaccggctggctcatccgccccggcagacgggtggagagcagcacctgagctacctcccgggtacgttcgtcgcagcgcagtcgcgggcgcatcgcctcgagatagtccgccacctcctgcggtgtctgagggatatcccgagcccccagccgccgggcgatttccgccgactcacgaaaatagtcctcctggcgctcgggactgaccaccgtccgcttgtagcgcaggtgggaggccataaagcaactgcactcggcgacgtgcacccaggttaacagcgccgggtcgctcgcctgatacggggttccgtccttatccaccccggcgatccgctgatggatcccctgtactttggcgattagccgttcggcgtcgggggtagtggcaaaagtggtggcagaaataaactggctggtgcggcgcaggcgacccaaaatatcctcgcgaaaacgagagtgatcccagacgccgtccagcgccagaggatgcagcatctgcagcaacagcgcgctaatgccgccgcagagcatcgaggtaaaatcgccgtgcacctgccagatggccgactggggaccaaacagccccggctctcctttgggtcgttcaaagtcgatctcttttagcgccatgccggtcaggccgagcacctgcgcctcgatcatccggcgaatgccgatcatgatggtatcccttacgtgcaactaaaggacaaaagataccactgttggacagcattgggagagatattgcggaaagagtgcccgcagcacgcgggcacgacggcttacggattcagctggtaatcgagggtaatgttggccttcagcacctgcgataccgggcagcctgctttcgctttctggatgatctcatcgaacgccgccggagacacgtccggcaggacgatctggctttgcagcgcgatatcggtaatcgcaaagccgccgtcggttttattgagggtgaccactgcggtagtgtcaatggacgttgcggtatatccctcttcgctgagcatcagcgacagggccatcgaaaagcaggcggcatgtgcagcgccgatcagctcctcagggttggtgcccttcaccccctcaaaacgggtgttaaatccgtagggctgctggctcagcgccccgctttctgtcgacacggtgcctttgccatgcttcaggtcgccttcccagtgcgctagccctttcttatgaatcgccatttgattcctcctgtagtgatgtcgaacaaaaagtatagtgcgtgatgccgaagctgcgtctttttgcagcctctggcccccacgttcccctggttttcgtgtcgttggtgaggcagggtgacgctatcggccatcctgcggatgccagggatcggatttgtcatccttgctgtcgtcccgtttacgcggaacttcgccctgctctccgggcgcctcacgggcaggttgcttaccgcgctcttcgtcttgcgagtgagaaaaggtgctcatatcgacgtgctccgcttacttaggcgactgcttgagcagacgatcgattcgcacgaccggcggcgtcattttgcgatccagactgccgttgatattgaccagatcgtctggctctacgtgttgttcgttaaacgcggcgaccgggataataacggtgatggtgccgcttttatcacgaaactgataacggtcatctccctgccgcttgagcagattgccgcgcagcgaaacggtcgcgccatcgtgcatggttttcgcctgctcaacggtcatgatccggccatcctcgacgccgcgatagccgtcatcgagtttgtgcggcggcggcggcgcggcatcctggctaaaccctcccttatcgtccgcctgcgcgacacctacggcaaacagacatgccatggccaatgctagttttttcatcatgcctccgttttttgctgacgatgagaataaagcctggctgatgctggccatttttacaaagtcaattgttctgatatcgtctaatataagaatgtccttatcgttacgctcctggcgaaacgaaacgcggggaaaatattaatgattaagaatcaacagccttgtcctatcgtcgatgagaatgaacgctccttacgctttgaatatcgtttccgccgctatgggataattgttttgagtctcatcattcttaccgcgttaagcggcctgtggtcctccggttatttcagtgaagcacacagggaaactagtggaggcgaattaagcgtcgattatcagcgctatgccaggctgatgagtgaaaccgagtttaatattcagattaaaccggatacggccagcgacaccattatcagcttcgccgccccgttattaacccgctaccagatcggtgatatccgtccgcagccggataaaatgtatagcgccgacgggaaattacatctcgtctatcagcggtcgaccccgccttcaccgatatctgtgtggttagccgttaccccaaaaacggccggtaatatctccctgcaggcggtagttaacgatcgctattctgtaacctggcagcagtttgtctatccgtaggagtcgctatggaaatggtccttagagccgcagcaatctatctgatcctgttgattatttttaagattgccggcagaagaaccctgatgcaattaaccaactttgacctgatactgttgctgattatcagcgaagccacccagcaggcgatgctcagcacagactattcggttaccgggtcgatgctgactatcgtcaccctggttagtattgatattttgttcggctatattaagaaaaaatttgctcaggcagaaaattttctcgatggtacgccggttatcgtggtggaaaatggtgctgtcatcgacgagaagattaagctcgtcaatatctctgtcgatgatatcctgctggcggccaggcagcaccatggcatttatgaattgaaagcgatcaaattcgctattctcgagcgtaacggccagatatccattattcctgagcaggaatagtatcggcttcgctatttatcacgctccggttgtttatcacctgattccggagcgcgagtggcgtcatcctcttctttttcaccgttaacaacgttcaacattaacatttttcctcctcgctggttgtcagggatcctacaaattatagaacgccttcgccgaagtatgtaggatctgccgaaactaaccaggagatgccgcctgattcacattgcgcttattccaggatatttcccacctcgtcattgccattggtgagaaataattaaccgatccgtacagtcaatattgtgaaagccaaaacataatgaggtcactatgtctgtgatggttattaccggtggaaccgcgggagcgggcaaagctaccgcgctgcgtttcgcccgcgctggatatcacgtggcgctgatcgcccgagacgaaacgggtttgcaggagacgcgacaggcctgtgaacggtttggcattaaaacgctggctattagcgccgatgtcgtcgatgccggggcgctgcagcgcgccgccgccgaggtggaaaccaccctcggggcaatcgacgtctggatcaacaacgccatgaccaccgtgctggcgccctttcgtcagatgagcgaggaggagtttcgccgggtgacggaggtgacctatctcgggtacgtgaacggcacccgcgcggcgctggaggtcatgatcccccgggatcggggggtgattattcaggccggctcggcgctggcctggcgttcaatcccactgcagtcggcttactgcggagcgaaagcggcgatccgcggctttaccgatgccgtgcgaaccgaactgatgcatgagaaaagccacatccagttgaccatggtgcaactgccggggatgaacaccgcccagtttggctgggcgcgaaacaaaatggatcaggccatgcagccggtgcccccggtctatcagccggaagtcgccgccgaggctatttacagcgtcatccagcgcccggtcaacgagctgtgggtcggaaaaagcaccatccagtcgatcctcggccaggtcttcttccctcgcctgctcgatcggctgatggtgaaaaaagcgtgggagggacagtttaccggtcagccaaagtcgtcagaccaacaggacgacctgttcacgccggtgcgcggcaatcatccgggccacggcccctttaacgatggcgcacggcgtaaagcagtcaccatcagcgccgatctcccgggtaaagtcgccgccggcgtcggggtagcggtggcgacgatggcgctgcgggcgttgttccgtcgttccggaaaacggcgctaactcaggctgcggctgaaccaacggtaaccatacccggagagtgccagccgcgcatctttcccgccgtgcagcccatcctgatagagcttatcttccagaattgggctccagtagccctcggccagcggcgggagcaggacctctaccgcctgctggctgcagttggccagcatcagtacctcccgcgattcgctgcgatagagcaagcccagcaccgcgtcgggctttagggtaaggagagtaaaagggagggatcccggttcagtatattccgtgcgcgccaataccatattgcgtacccgatgcagcagcgacctgggatggcgcagcgccgtttcaacattgatccgttggtagcggaaccgcccgctggccaccggttttaccggcaaatcatcccgcgccgcccgggaaaagccggcgttggccgcggccgaccactgcatcggcgttctgaccgcgtagcgctccggtaaggagagatcgtcacccatgccaatctcgtcgccatagcgcatcaccggcacgccgggcagcgccagcaggatagcatgggctaacgctatgcgtcgggtatcgccgtccagcatcggcgccagtcttcggcgtacgccgcgctggtaaacggacatcgatttatcaggggcaaaggtgcggataacctggcgcttgttgcgctcgccaatcccctcaagatccagttcatcatggttgcgcagccagttgacgaagcagcacccgtccggcggggtcaccatcgcctgcagggccttcaccaccggcgcggcgcgctgctgcgccaggctgaggtagaggtatttgttaagccagaaattaagcaccatctgcagccgatcgccctggccgaaataatgacggtaatcttctaccgcgacgtccacttcacccaggagtatcgcatcgggattgaggcgctgtacaacctgccggagatgggtcagcagcgggtagccgcgcgtctcgtcgccctttccggcctgcttgaccagatgtgacgcggcatcgagacgaaagccagacaccccagcctgcagccagaaggtgataatgttttcgatttcagcgatcaccggcggatgggcgagattcaggtcgggctcgtggtgataaaacatgtggcgataatattgcccagcctgttcgtcccagcgccagacgctctcctcaacgccgggaaacatgggaggatcgtcgttttccggcggccgatcggcccacagataatacggccgccacggcgaccggggatcgcgtcgcgccgcctggaaccacgggtgctgcgcggaggtgtgctggatcaccagctcaacgatcacccgcagtcccagctcgcgggcgcgggcaatcagctcaatcacgtcagcgatagtgccgaaccgcggatcgggctgcagatgatcgctgatatcatagccatcatcctgcagaggagtgagatagaacggagtcagccagagcaccgtcgctccgaggctgcgaatgtagtgtagcttttggcgaatgcccgcgagatcgccaaaaccatcgccattggcatcataaaagagcgaactgtcaacctgatagatgaccgctctgtgaaaccactcttcccgttgcatcactctcacctcgcgttctgcccgtccctgtcagccgcctcagcgcgatccggaccccgccctggccttcgcgcgcggtttgccgacaggcgatacgggattgcgttccgctggtagcatcctgttcgctaccgcgtccaccagcgcctgctgcctggcggttaataccagcggaacctgttcctcggcggcgaggagcgcgatggtttgccgtttgaccatagcgttctccggcggcttaatgcccggcctcaacgccaggcatatcggtatccataagatattgcccggtcagcgctggcagataatggagcagccaatcagccattcctctctcttcagccaggataccctccagtgtatgcatcgcgctgtggtcgcctactcttttcgccgccgttaataaagcggtatagcaggcgacctcaaaatgggcaaaaacgtaggcagtgataatcactttaataacctcatcaccgggcagcatgatgccaatggtctgtcctaacgccgccacccggctcatcgcatccttcagcgcggagcgggaaatatggttgcgggcgatgatatcctgcagggcggacaattgccgtcgggtttcatagagatgttgttcaaggcgggtgcgtaactgcggttcattatcgaggcgtctgatggtggccaccagcagcgactcagcctgtttttccatggcatgcgcatcgcgaagccagttgtgataattttcgatatccgtcatatacacctctgatcattaaccttttattttgacgtggaatcttcactctcttccgccgcctggtcagctcgcgctgcgctatatccggataaatggccaacaatattggcataaatactgatgagaatgacccacagtacgctgtctttccaccagattaacgagggtatcgccagacccacccacataacggcggcgacaagatgacagcgcttaataaacactggcgtcaacttcattttattaccttaggaccgaacaatattgagcgaccattttatcgacgctctgaccgctgcgtcaggcgctaaaccttacgctgaaaatgtctttcttttgcctaagcataaaaaagaaaacagcgttgcgtattgtcccgttccgttattttctgtctttaccgtccggctaatttattgccgctgcggccgtctttaattgctagtgatgcggcgatttcctcctcaccttttagtttccccacatcgcggataatgaatgtcgttatagataaataaaccctgaatatgcagaaacctgcggaccatctggcccacaggttttgtctcaacgccgatttgtcggcgtcacagctcatcagtcgctagctgtcaccggatttacgaccgccgccatgactgttcttaccacccttcttaccggcttcggatgcacgttcaggatcatttttaaagttcccgccgctgtgctgtccgcctttacgcccggcttcggatgctttctcacgatcttctgcaaaattacctgaaccgcctctatgctctgccataattttcacctttggtttgatcaatatcggttggtaaatggaaaatgaccctgttacaaatcatcgccctcgatatctaaggaaggtgcgaacaagttcctgatatgagatcatcatattcatccggagcgcatcccagagggacatcatgagccatcaactcaccttcgccgatagtgaattcagcactaagcgccgtcagacccgaaaagagattttcctctcccgcatggagcagattctgccatggcaaaacatggtggaagtcatcgagccgttttatcccaaggcgggcaatggccgacggccctatccgctggagaccatgctgcgtattcactgcatgcagcattggtacaacctgagcgacggtgccatggaagatgccctgtacgaaatcgcctccatgcgcctgtttgcccgattatccctggatagcgccctgccggatcgcaccaccatcatgaatttccgccacctgctcgagcagcatcaactggcccgtcaattgttcaagaccatcaatcgctggctggccgaagcaggcgtcatgatgacccaaggcactttggtggatgccaccatcattgaggcacccagctctaccaagaacaaagagcagcaacgcgatccggagatgcatcagaccaagaaaggcaatcagtggcactttggcatgaaggcccacattggtgtcgatgccaagagtggcctgacccacagcctagtcaccaccgcggccaacgagcatgacctcaatcagctgggtaatctgcttcatggagaggagcaatttgtctcagccgatgccggctaccaaggagcgccacagcgcgaggagctggccgaggtggatgtggactggctgatcgccgagcgtcccggcaaggtaaaaaccttgaagcagcatccgcgcaagaacaaaacggccatcaacatcgaatacatgaaagccagcatccgtgccagggtggagcacccgtttcgcatcatcaagcggcagttcggcttcgtgaaagccagatacaaagggctgctgaaaaacgataaccaactggcgatgttattcaccctggccaacctgtttcgggtggaccaaatgatacgtcagtgggagagatctcagtaaaaaccggaaataacgccagaaatggtggaaaaaatagcctaaataggctgattcgatgtgtttgcgggaaaaaaatcggcccagatccgcgaaattttaatcagcgagtcagcttgggaagaaatgacctgcttattcgcaccttccctaacactagaggaatgcctgcaggagtcaaattaatttcagatacccatccgcgcactgacaaaataaagctttactaacgaagcggtaagataaaatatacctcacacaactcctttatttgacgtaggttatgttcaccggcgggtaaaacagaaacgtccaacggccgtttgtaaaaaaatgcaaacgatttaatgaataaatatttctttatcccgcggaacacaaccccaggaatattacccctaaagaggtattactttatagaccatggtttgcgaatgaacatcttcatcgtttattcaggcagcaccttcatcgtaacttgagaaaaagatcatgcgcgttacgaaaatagcccttggcccttgattaaggatggaataatcctaatttaacgtcagcaataataacgcaacgctatcccccgaaatacgccaaggatcagtcggttaaggcataccgttacgcctacgattggccattgactgcgatgttgcgagtcatccagggtctgtcgccaggagaagctgacctattcttagagctggcccgttctgtctgaaggagatgactatgcaagatgaaaaaccgccaatgaagaagttacccacctccatgttgccagaagagacggctccacgtccggagttcccggagcaagaacaaaccccgccgggtctggatgcggaaatggagccatccccggaccacggtgaaaccagctacaccggctccgggcgactggccggtaagaaagcgttaattaccggcggcgactccggtattggccgtgcggtggcgatcgcctttgcccgcgaaggcgccgacgtcgcgataaactatctgcccgaagagcaaaaggatgcggatgaagttatcgccctgatcaaagccgaagggcgcaccgcggtggccctcccgggtgatattcgctccgaatccttctgccagtcgctggtggccgacgcggtggaacagctgggaggtctgagcatcctggttaataacgccgggcgtcagcaatactgtgaaacccttgaggaactcactaccgaagatttcgacgctaccttcaaaaccaacgtctacgcgccgttctggatcacccgcgccgcactgcctcacctccaggccggaagcgcgattatcaataccacctcggtgcaggcgtataaacccagcccgatcctgctcgattatgcgcagaccaaagcctgtctcgcgatcttcactaaatcgctggctaaacaggtggcgaaacgaggcattcgcgtaaacgccgtagcgcctggcccttactggacggtgctgcaatccagcggcggccagccggacgagaaggtgaaacagtttggcaaagacacgccgatggggcgcccggggcaaccggtagagatcgccccgctgtatgtcaccctggcatccgatgcctgctcatatacctccggacaggtgtggtgctctgacggcggggatggtgtggtctaagcctcccggcataccgacgcgcgccagcgcgcgccggtattttcccggccaacccttgcggctatatactggcccctcgcctcccggttgcggcaattttttctttcctgcactccgctactctggccgcatgctatgatgtccgcccgccgctgtgcgctaaccctggccccgacgccacccctgaggacgacagatgagtaatgacatccccctgaaattttatgacatcgtggacgaatacgagaccgaagcggctgcgccggtaaaggatgaagaacgcgatgcgctggcgcgctatttccaactgctgattgcgcggttaactaataacgaagagattgacgaagaggcgcagcgagaaatggcccgcgaggcggccattaacgaaaaccgcattgacgatatcgctaattttcttaatcagtggggcaacgaataaagctcaacgtcagcctaccggcggaattgccttccgccggtgctgcctgggcacgaagcgcctagactcagccgtggccagtctcctctcccagacgcctctgcagcgcatcaagaaatagcggtaatccgtcaggttggtagtcgcgggaaagatagatgccgtaaacgctcaacgcctttggcgtccactccggaagcaccacctccagcgtgccgctgtcaatcgcgccccgggcctccagttcgggaagcatcgcaatgccgcacccggcaaccgccgcctccagcagcaatgaagatatccctgcgctcagattaccgttcaccgccaccgacgcttcccgcccctgcgcatcgctgaactgccagtgctggctggcgaaatggctgtatagcaggcagttatgtcgttgcagatcgtcgggcgtcgtcaacgggccatgctggcgcatccagcgcggcgcggcgcagagcagcgaacggcacactccgaggcgacgagcgatggcccccgcttccgggttgtcggtaatgcgaatggccacgtcgatacgctcgccgatcaggctgaccggatggttattgatatccagctccaggcgcagcagtggatagcgggcgagaaagtccggtagcagcggggagatcagctgcatggcggtaaagtgcgcgcaggcgacgcgcagtgtgccgctgggatcggcccgctgacgctcgccggcgatttcatcggcgatccgcgtcaaaccgcgggtcttgagcaataccttttccccggccggggtcagcgtcagccgccgggttgagcgatggatcagccgggcgccggcccagctctccatctgttccagatagcggctcaccatcgggcgcgacatacccagcgcccgcgccgcggcgctaagacttcccagctcgcagatgcgcagatacacctgcgcagcaatcaccctgtccatcactccccctgatctgcacgttttatgaaactcagcatctcttgtttcaggaattttatcaaatagcgaaatccgtacaatggaacgcattcacctgttactgagaataaatcatgaaattatctgcccttgctgttgctaccgccctgttcagcggcgcggtcttcgcggcgcctctgacgctgcaaacttacaacccgcaggaaaaaggactttttgccgtcaactcgaccctcgtttccggtccgcatgaagcggtacttttcgacgcgcagttcagcgtcaaagatggggaaaagctggtggagatgatcaagaaaaacggcaaaccgctatcgcggattgtgatcacctctggcgatccggatttctattttggtcttgagccgctggtaaaagccttcccgcaggcggaggtggtcgccacgccggaggtcgtcaaacatattgcagccaccaaagcggccaaactggcgtactggggcccgcaaatgaaagacggcgcgccgacgcaggtgtatgtcccgcaggcgctggaggccaacagctttaccatcgatggcgagaaagtgaccatcatgcagccgcatgactacgcggcgttcgtctggatccgggcgaacaaaacgatcctcggcggcaccggcgtggcgtggggtatgcatctctggaccgccgacacccagacgccggccagtcgtcagcaatggcgtaatacgctggaccagatgatcgccctgcacccgcagcgggtgatcccgggccattatctcggcaccccgccggagggagacagcgcggtgcgctttacaaaaacttatctccagcagttcgagcaggcgctgaagacgcattcggattcggccggggtgatcaaggcgatggaggcacagtggccgggcctggcggagaccagctcgctggagttaagcgccaaagttaataccggtgagatgaagtggtgacccctgcggcgcgcaaggaggactgttcttaatctggctccccagggttgctattaccgagaaaatggaccaccctacctgtggccgcacaaaaaacgcgcggccgactttgggttacatttcatccggtcattaccgggtttgcccttgaaaccagaacaggataaaggagtcagaatgaaatcgaaccatcaggcacgtcatcttctcggtctgaactataagctttcccggcagaaaaaagtggtgctggaaggcgatgaagaaaccaccatcaaccacatccatgctaccggccgcaaacgccgcggtggttaattttcagcctgagtgatgataaacaacaccgtcctgttgccaggatggtgtttttttatggcaattgactgcttgtttacccgcttgaagaccttctgctctatactctgcccgctgctttccacccgcccttcgcttatcgccgcgccgggactgtggtcatgatcaaggagttagtgcgatgcaatttacccataagaaaaaccgttccctgtacatcccctacgcgggtcccgttctgcttgaattccccctgctcaacaagggaagcgccttcagtatggaagagcgcagcaatttcaatctgctcggcctgctgccggaagtggttgaaactatcgaagagcaagcggaacgcgcctggatccagtatcagggattcaaaactgaaatcgacaaacatatttatctgcgtaacatccaggacaccaacgaaaccctgttttatcgcctgatcggcaaccaccttgaagagatgatgccggttatctataccccgacggtaggcgcggcctgcgaacgtttctccgagatctatcgtcgcgcccgcggcgtctttatctcctaccagaatcgccataaccttgacgacatcctgcaaaacgtcccgaaccacaacgtgaaagtgattgtggtcaccgatggcgagcgcattctcggcctcggcgaccagggaatcggcggaatggggatcccgatcggtaaactgtcgctgtacaccacctgcggcggcatcagcccggcttacaccctgccaatcgtgctggacgtcggaacaaacaaccagcagctgctcgacgatccgctgtatatgggctggcgccacccacgcattaccgacgacgagtactatcagttcgttgacgacgtgatccaggcgattaaggcccgctggccggacgtgctgctgcagtttgaagattttgcgcaaaagaacgccatgccgctgctcaaccgctaccgcaatgaaatctgctcgtttaacgacgatattcagggcaccgcggcggtgaccgtcgggacgctgatcgccgccagccgcggcgccggaagccagctgagcgagcaaaaaatcgtctttctcggcgcgggttcggccggctgcggtatcgctgaacagattatcgcccagatcgtccgcgaaggactcagtgaagaagaggcccgccagcgcgtgtttatggttgaccgcttcggcctgttaaccgacggcatgcctaatctgctaccgttccagaacaagctggtgcaaaagcgtgagcagctgcagagctgggataccaccagcgaggcgctgtccctgctggaagtagtgcgcaacgtgaagccgaacatcctgatcggcgtctcgggtcagccgggactgttcacggaagagattatccgcgagatgcacaagcactgcccgcggccgatcgtgatgccgctctccaacccaacctcacgggtggaagcgacgccgcagaatatcctgagctggaccgacggcgaggcgctggtcgccaccggcagtccattctccccggttaccgtgaaaggcaagcagtatcccatcgcccagtgcaataactcctatatcttcccgggtattggactgggggtgatcgcctccggcgcgtcgcgggtcaccgacgagatgctgatggctgccagcgaaaccctggcgcagcactcgccgctggtcaacaacggcgaaggtccggtgctgccggagctgaaggatatccagaccgtctcacgggcaattgccttcgcggtcggcaaggtggcccaggagcaaggcgtggcggtgaaaacttccgctgaagcgctgctgcaagcgatcagcgataatttctggctaccggaatatcgcaattatcgccgcacctcgatttaatcacgctcaccgggtcgacatatcggcccggtttttaataacgtcagaataatacctcccgccacagaaacgttttttccgcctatatacattcatcgtaaaaatataaaacggatagcatttgccgcgcgccctccgctgtgcaaaatagttgtttctcaccccctcacaacggaatgtgaaatgctaaaattaacccttggcgcgaataaagcgaatgcgattctgatccgtattgtcttgtttcttatcggaggtatcgccatcatcaccggaatgtgcctcttcagcggcgatatgtggatgctcaccccgcgggcggaacagtatcagcccgccaccggcgatctggtggatgtcgtcatctatgaaccgagtaaatttttcttcgctctgctctacgtgtttattattaccctggtctggctgttggcggtacgtaaaatcccctggcggccgatacagcatcctatattaccgctgatggtactgattgccgccgggatatttattttcctccacccggaggtcaccccgggtcgggatgccagtattcagtacggtaaacacaatacctattatgcgtccatattctggatgaaaacccggtcaggtagtcattccgctaagcaatcaaaatatgaaacctttgttgaagcgaaagatccccgctggcttatcgacagaaacaatcttcgccgcgcctggcgctgtgaagtgcagcggcatacccagttttacaccctgtcattcaatgagggctggttcccgaacggcgatccgcaggtccttgccaaccagtgtagtcagattgccgatctggatacggtctctgaagacgagctgcttgtcactaaaaccatcaggagccgtaaatgagccagcaaaaaatggttttgcagccgatattacgcctctggctggggctgtttagcggactgttgctggtgagcgccatcagcgcctttcacggtgagtactggtatttcggcgataagcaggcgttttacgcggcgaaagccggcgaggtctctgtgcatgaactctatacgccggcgaaaatcctctttgcttttatcgtcagcacgatcccgccgctgctgtggctgctgctggttaaccgtcgggcgccgcggctgctgacccacactctcccatcggtgttactcctgctggcgggtttgctgtttttcttcctgagacccgacgtgattcccggcggggaaacccctgtctatcgctacggcgagcgggagcgctactaccagacgatacgctggcagaaaccggagcctggcgcgtggcggggtacccgctctgagtacaacgtgtatatcgaatatcgtgatcccaggggatatcgcaaagtcgacaatattaaaaacgcctatacctgtgaaacccaccgggagtctcgcttttttaccttaacgaccgaagaggattggtatccggattcgtatccgaatattctcgaggctccctgccaggcgataaaggatccccaggcgatgacggaatatacccgcgaccacgcccgctggtttcccattacgttttagcaaacacactagccttctgcgccaacaatatctcgccggtaatggcactgaacacgaaaactggtgggtatcggcccctgccagttttgtcactggcgcgctttccctttccccactacactgccatcacccatccactgactgaataaaaaaggaggccccccatgctgtattgtgaaatgtttattgtttcacatgccttaggcaattgcgccagctcaagcgttatcggtatcgtgctgcgataactatggcttgagcgaagacccttcacgcaatcccttctctccggcttaccgggttatcgtcagcgagttttgacgaggcatttgcatgcctgtaactcttgagtaagttgactatgagtacattactaactgcccatgcgctccacgtggagacggcttttgggccgctgtttaactccctctccttcaccctgaagaaaggcgaccggatcggtctcatcggccataacggttgcggcaaaagcaccctgttacaggtgctggagggcaccctcgcgcccacctcgggcagcgtctcgctcgccggtcagtgtctgatggcccgcgttgaacagcatctgccggaggcgctgcatacgcagtcgctgctgcaggcggtgctggccccattacccgccgacgcgcgggaagcacagcgctggctggccgagcgcctgctggcgcagatgggctttaccccggcggtgatggagcagcagaccgccaccctgagcggcggccagcacacgcgtctgctgctggcccgggcgctgatccgccagcctgatctgctcttgttggatgagccgggcaaccatctcgatctgcccaccctgctgtggctggaaagcttcctgcaaacctggcaggggagcttcgtactggtgtcacacgacaacaccttactggatgctgtaactaatgcgagttggatcctccgtgaccagacgctacattgcttcgccttgccctgcagcgctgcccgtcaggcactgcaggagcaggatgaaagcgccgcgttacgtcataaggcggagcaaaaagagatcgaccgggtcagcgccagcgcccggcggctggccacctggggtcgggtctatgacaatgaagatctcgcccgcaaagccaaacagatggagaagcaggtcgcccgcctgaaagacgagcagaccgagctcagcgtcggcccgccgtggcgcctggtgttacagggggaccccctgccggccgaccgccttttggagatggacacccttcccgtctcgcccgcgccgggtcagccatccctcttcaccaccggcgtggcgcgcctgcgcagcggcgatcgcgtggccatcatgggacgtaatggcggcggcaaatcgtccctgctgcgcctgctgtggcagcagatgaacaacgcatcgcctctcccggggctgcgcctgcatccccggttgcaccccggctactatgaccagacgctggcgcagttgccggacgaggccagcctgctcgaggccctgacgccgtttgccccgtcggcggacacccgtaaacgggcgctgatcgccgccgggtttggctgggcgagacatagccagaagatcagcaccctcagcggcggcgagcgatcgcggctgctgttcgttggcctgtcgctggcgcgctacagtctgctgctgctggatgaacccaccaaccatcttgatatggagggtaaagcggcgctggcgcagacgctgcgcgattaccccggcggcgtgctgctggtcagtcatgaccgccagctgattagcgaaagctgtaaccgcttctggctgattgacagcgccgggctaacggagtggcacagcctggaggaggtctatgcccgtctgcaggccgtggcgcccgccccggacagtcggctcgctttgcagagtacacccgccggggctgacgatgatgaggaggcgctgctggcgcggctgattgacctggagcagtggctggctgacgacatggcccgcaagccaaaacatcaaaagccgtcactgcaggcacagtggcaagaggagattgcccgcctgcttaaccaactgacgtaatctccatgtccccccaccggctaaggcgccacgcccttagccggtgtttccggaccgggtaaactgctgctcggtcattacctttccccactgctccccctgccattcgcggattaacgtgaagccaaaggattcatacagtttgcgggccgcgtccagccctttaaaggtccacagctgcaccgcgctaaactggcgactatcgcagaaagccatcgcctcgctgaggagccgcctgccaatgccggttccccggcagctgtcatcgagaatgaaccagcgcaaatgcgcctcctgctggccgaggtcctcgccatcgatagccagcgagccgacgattttcccttcgcggatcgccagccagatctggttggccggggaggagagccgggtggcaaattccgctacgccgctggcgaccttgccttcaaaaaaagcgccaaagtcatgatgacgggcgtaatactccccgtgcatctgggctatccggccgatcatccccggatggtagccggtcatcagtgaaatttgcggagccgtatccgcaagcgcgctatcccgacactgcgccagcgcccgggcataggccgccagtccagtggcgacagtttgctgctgcgtctcatccagatggtctaacgcctccaccacctgacgggtaccccaggcgttaattttcgccaccgtatcgtgcccctttgccgtcagggcgagtgatttcgcgcgcgcatcctccgcgcaaggacgctcctccagctcaccagccgccagcagacgagagaccatccggctgacgcttgatttttccagtcccagcaacgtgaccagctgcgcggccgtcatctcccccctcatcgatacctcaagcagggtgtgcaccgccgaaggtgaataatgggtggcggccagcgtggtgctcataaagcccagctcgcgcaccattaaccgcgaggcggtacgaatctgttggattaagggggtatcaggcatggcggcgggtccagaaaatgaaatggttgtacaatacaaccatcgccttcatcctgcgtcaagatgcaatatggtggaataagcgttgtcgtgtgacgtgtgacgtgtgattttgccgccatagggatcgtgaaagcgaatgccgcgggcgccggacagcgcccgcgatgaatattattgcgggttcttcgccttccaggcctcccaggccgatttgatctcctgcttcgcggccgcggcgtcattaaagccggccagctcgacctttttacgcccctccggcagttctttatagacccggaagaaggcctccagccgctgctgttctattttcggcagatcggagatggtcttgatgtcgtcgtaggtcgggtcaattttactggccggtacggcgatgattttgtcgtctttctcaccgccgtctatcattttcagcacaccaattgcccgcagcttaatcagcgtgcccggggccatcggcgcgcgggtataaaacaccacgtccagcgggtcgccatccccggccagcgactgggtcagcgagccgtagttcgccgggtaggccaccggcatcgactgaaagcggtcggcgacgataaaccccgttttagcatcggtttcgtacttaatgatcccgcccgtcgggatctcagtgacggcgtaaaattcttccgggttgttttccggctggggaaattccagcacattgtgggcctgggcggcggcggacaaaagcagaccggcggtgaggatggtttttaccagatgcattgttgtatcactctgttgttataagaaattgatgcgcaaaacaatagattcgagtgatgacaaaaacatgaccattcagcgtcaatattattacctaccaaatatagcgatgttgtctgaattttgtgctatctctgtagcaaaaagccacattctgtactaagcgccttgtattttaccgctcagcgtctaatccttattgggtactattgcattaattaagttaatcaattcccccacaaggagacaggcatgaaggcagctgttgttacccacgaccatcaggttaacgtcacggaaaaaacgctgcgcccgctggaatacggcgaagcgctgttgaaaatggaatgctgcggcgtgtgtcatactgacctgcacgtgaaaaacggcgattttggcgataaaaccggcgtcattctcggccatgaagggatcggggtggtacaaaaagtcggcccgggcgtcacctccctgaagccgggcgaccgcgccagcgtggcgtggttcttcgaaggctgcggccactgcgattactgtaacagcggcaacgagacgctctgccgctcggtgaaaaacgccggctataccgtcgatggcggcatggcggaagagtgcatcgtcaccgccaactacgcggtaaaagttccggacggcctcgactccgccgccgccagcagcatcacctgcgcgggcgtcaccacctacaaagcggtcaaggtctcccacatcaaaccgggccagtggatcgccatctacggcctcggcgggttgggtaacctcgcgctgcagtatgcgaagaatgtctttaacgccaaagtgatcgctatcgacgtcaacgacggacagctggagctggcggcctcgatgggcgccgacctgaccatcaactcccgcaatgaagatgcggcgaaagtgattcaggaaaaaaccggcggcgcccacgctgcggtagtaaccgcggtggctaaagcggcctttaactcggcggtggatgccgttcgcgccggtggccgcgtggttgcggtgggcctgccgccggaggcgatgagcctcgatattccgcgtctggtgctggacggcatcgaggtggtcggttcgctggtcggcacccgtcaggatctggtggaagccttccagtttgccgccgaaggcaaagtggtgccgaaagtcaccctgcgtccgctggaagatatcaatgctatcttcaaagagatggagcaaggtcagatccgcggccgtatggttatcgatctgcgtagctaatcacccgcgcctctcccgtccgggagaggcgatccccctggcacgtcctctcgcttcccaacccgggaagtaaatgcaatttccgcaaatgcttagcgcaattccttggttcctttgtttttagccgcgcccgatgatggcaacacaatagataacaaaggaattcaccatgcatcgtcattttcgcctgcccgcgctggccgcgctgtttctcaccggcgccttttccgtctgggccgccgacacgccggttaaaggcggcaccttaatttatctggagcagcaaccgcacaccaatctctatccgcccgccggcggcttttacccgaatggcgggattctcaatcagataaccgacaagctcacctggcagaatcccaaaacgctggagattgagccgtggatcgccgagagctggaccagcaacgccgataaaaccgagtacaccttccacctgcgcaaaggggtcactttctcagatggcacaccgctggacgccgccgccgtcgccaaaaacttcgatacctatggtctgggagataaagcccatcgtctgcccgtctcggaggtcatcaataactaccagcgcagcgaagtgatcgacccgctgacggtaaaattctacttcaacaagccgtcgccgggcttcctgcagggaaccgccaccatcggctccggtctggtatctctcagcaccctgcagcgtaattttgaagagctgggcgatgcccgacatattatcggctccggccccttcgtcgtgcaggatgaaaaaccaggccgcgagctgacgctggtggcgcgcaaggattaccagtgggggccgaaaaacattgcccagcaggggcccgctaacctcgacggcatcacctatattgtgacgccggaagacagcgtgcgtatcggcgcgctgctggcaggtcaggcgggctttattcgccaggtgcaggcctacgatgaaaagcaggctaccgatcagggatttaagatctacgctgcccctacccgcggggtcaacgacagcctgagcttccgcccggataacccactggtcgccgacctgcgggtgcgtcaggccctgctccatgccaccaacgccaggcaggtggtggagacgctgttctccgctaactacccgcaagccacctccgtgctggccagctctgccgccggctatgtcaatctcagcgataaactcaccttcgaccaggccaaagcccggcagttgctggatgacgccggctggaagcccgccgccgacggtattcgcagcaaagacggtcagcggctggcgctgaccgtctatgagtcgctgccgcagccgcaaaataaggaagtgctgcagctgatcgcccagcagtggcgccaggtgggtgtggcgttgacggtcaaagccggggatgccggtagccgtacgctggataacctcgacccgcagaaaaccccgctcaccgtctcagaagtgggccgcgccgacccggatgtggtgaaaagtatgttcttccccaacaaccgcgatgcgctgctgcagaaaggcggctccagcgataaagtgcagcgcttccgcgatgataagctcaatgacctgctgaccggcatctccgcggcggtagagccgcagcagcgcttgcagttaaccggtgacgcccagcgctatctgatcgataacgcctatgtgatccctattttcgaagagccgcaggtgttcgccggcgcgccgtgggtcaaaggcgtcagcttcgaggccgtcggtcgtccgtcgttctacggcgcgtggctggacaagcactaagaggccggttatgagcgcttatcttctgcgacgattcggccaggggctgctggtcctgtgggcggcctttaccctcacctttttcctgctgcaggtcctgccgggggatgcggtgctgatcaagtttcagaacccggacctcggcctgagcccggcgcaaattgcggagatgcggctggcctacggcgccgatagcccgctgtggcgccagtacctgcacacgctgctggcgatgctgcacggcgacttcggctattccctgcaggcgggtctggcggtcagcagtctgattgccagcaacctgccggataccttaagcctcgcgctgccggccttcctgctggccgtggcgctggcgttcgccctcgctttcgcctcgcggctgccggggctgcgctggctgagcaattttctgcagtcgctaccggtgttgtttatctctctacctaccttttggttgggtatcgccctgatccagctcttctcgtttcagttgcgctggatcccggtaatcaaccccggcccactggaaggactgattttaccggttatcgccgtcgcgctgcccatttccgccccgctggcgcagatcctgatgcgcagcatggatcaggtggcggttcagcccttcgtcgcggtcgcccgcgccaagggcatgagcgaaacgggcgtcctctggcgccatgtgatggggaatgccctgctgccggcgctgaatattgccgggctgctgctcggcgaactgattgccggggcgctgatcaccgagaccgtcttcggccgcagcggcctcggccagctgacccagcaggcggtcaataaccaggatatcgccgtactacaggcggtggtgatgatctccgccctcggtttcgtcctgatcaacctgctggtcgacctggtcatgccgcgactggatccccgactccatttacagaccggaggtgcaaaatgagcctggtcgactataccatcgcggttcgccgccgcccggagtggcgtagagtgcgcctgcagcctggcctgtggctggcgtgggcggtgatgatcgccgccctgttaatggccattgccccacagtggtttacctccgctaacccgctggaggggatccccggcgctcagcgcctggcgccgcaggcgcactactggctgggtaccgaccagctggggcgcgacctgtggacgcgggtggtttacggcgcggtgcattccctgtcggcggcgctgatcgccgtcgccatcggcctggtggtgggtaccacccttggcgccctcgccggggcgctggccggacgcgtggaatccaccatcatgcgcctggtcgatgtcctgctggccatcccctccctgctgctgcagctcacggtgattattctgctgggtttcggcacggtaaatgcggcggtggcggttggcgtcgcggctatcgccagcttcgcgcgcctggcgcgagcagaagtggtgcgcgtgcgccacagcgattacgtcgaggcggcccggggcagcggcggcacttttttcgccgtcttctggcgccatattctgcccaactcgctcactgcggtgcttgctttcgcgacgctgcagttcggtcaggcgatgttggccctggccaccctcagcttcctcggctacggcactccgccgccggtcccggagtggggactactgatcgccgaaggtcgcaattacctgtcaaccgcctggtggctgaccaccttccccggcctcgccgtggtcgccgtggtccttgccgccaatcgtcttagccgccagtggagtggagtacgcccatgaccgttctgtccgttgaagatctacgcatcagctaccgctcgcggggcgaatggcgcgaggtggtgcacaacatcagcttttccatccagcgcggcgaaatgctggccttcgtcggagaatccggctcggggaaaaccaccaccgcgcaggccattatcggcctgctggcggataatgcccgccgggatgccgggcggattgtcctcaatggcgaagtgattagcgactggtcggataaacgcctgaaccgcctgcgcggagtgagcatcagcctggtcccgcaggatcccggtaattcgctcaacccggtaaaaaccattggtcagcaggtggaagagatcctgcggctgcatcagtccctctccgccgctgagcgccgacagcaggcccttaacctgctcgctaaagtcggtctaagccacccggaacagcgttttgaccagtatccgcatcagctgtctggcgggatgaaacagcgggtgctgatagccatcgccattgccctgcagccggatctgattattgctgacgagcccaccagcgccctcgacgtcacggtgcagaagcgcattctcgacctgctcgatatcctgcgtcgcgagtcgggtaccgccgtgctgtttgtcacccacgatctggcgctggccgctgaacgcgccgaccggatcatggtgtttcgccagggagagattcaggaacaaggcgccaccgagacgattgtccagcgtccacagcatccttacacccgccagctgctccacgacctgctggatgcgccgttggggctggcggcggctcgtcaccggccgctggccacgccggccattcgcgtggaggggatcagcaaacgcttctcgctgggcaaacaggcgctgcaggcgctcgacagcgtcagctttgaagtcagacgcggcagcacccatgcgctggtgggcgaatccggctccgggaaaaccaccctggcgcggatcctgctgggctttgagcgcgccgatgccggacaggtcatcatcgacggtatcgacgccgggcatctcagccgcgaggcacagcgtcagctgcggcgcaagatccagtttgtctaccagaaccccttcgcttcgctcgacccgcgccagacgctgtttgcgattatcgaagagccgttaaaaaactttgagcgcctcagcgcggcgacgcgtcgccagcgtgtggagagcgttgccgcccgggtggccctggcccccgagctgctgtcgcgtacgccgcgggagctttccggcggccagcgccagcgggtggcgattgcccgggcgctgatcctcgagccggcgatactggtccttgacgaagcgacttcggcgctcgacgtcaccgttcaggcgcagatcctcgccctgctgcagcagctacagcagcagctgggtctgagctacctgttcattacccacgatctggcgacggtcaggcggatcgccgacagcgtcacggtgctgcgcgccggccaggtggtggagcatggcgacgtaaaccgcctgttcgccgccccgcagcaggcctacacccgcgaactgatcgccgccattccccaggtttcctcccgcttagcacaggcccacacggagaacgcataatgccaaaacgcctcggtttttttacccgtctgctcgatcagggctccgcgcaaacgcgctaccggctggcggccgaacagatccgccacgcggagcgtttgggcttcgacagcgcatggattgcccagcaccattttcatgaacaggaaggcggcctgccttcaccgctggtgtttctcgcccacgtcgcggcacagaccgaccggatccgtctcggcacggcgattatcactctgccgatggaaaatccgctgcgcgtcgccgaagacgcagcggtactggatttactcaccgacggacgtctggaggtggggtttggctccggcggcacgccaacctcgtttctgcccttcggcctgaccagcgagcagcgcggggcggcgtttgccgaccatctgcacctgatccatagcgcctggcgcggcgacacgctgagccacccggacaaccgtctctatccgccggcgccgcagttggcggagcgtatctggatcgccaccttctcggcggagggcgccatccgcgccggtcaggcgggacacgggctgatgctgtcccgcacccagccacggccgcccggcgagccacgtctgccgctggacgccattcagaacccgatcatcgacgcctacctgtcggcgctaccggacggcgttgcgccgcggatcctcgcctcgcgcaccgccttcgtcgccgacagtcacgcccacgccctgcaggtcgccgagcccggtctgcgcaagcaggcgactcagcaccgggcggcgggtcatacgatagaaggtgacagtgtcaccgactatctgcaacagctggatgcccacgttggcgatcctgagcatgttattgcctccctggcgcaggacagcgtgctggcccgcgccaccgatatttcgtttcaggtgcactcagtcgagccttcgcaccgggatacgctgcgttccattgagctgatcgctcagcatattgccccccacatcagataaggagtccccatgacgctgagtcaggatattctggccgaactggcggagatcgcccccggttccccgctcgatcaggcgcgcgccgtccgcgatgccgccacccgtcacgcccagggaagttatgaagtgctgttccgccagcaggacgctgactttcctcttgatgaacgcttcgcggtggccgcgaaggtggcaaaactgcaccaggcggacgcgctggcggcgcactatgccggtttcggcctcgccgatccgaccaccgatcgtctggtcccggcgctggcctttgcccgcctgctcaccttcacccccgttgaagccactcccggcgcgctgcacaccttaaccggcgcgggctggagcctgcggggcatcgtcaccctggcgcagctggtagcctttgtcagcttccagagccgactgctgctgggcctgcgggcgctcaaccataagcccatcgtcagcgcagatacgccgctggtcgccggatactggcataccaccccgtacgcgcagagcggcaaagcggccccggttcgcttcacccgcgacgagctgcactgggaaccctggctggccgataaaccgctggcggaattcaacgctgaagaacaggcgattctggccaaatatggccatagcgactccccctactttcgcctgctggcgcgcaaccagccggtgctggagcagcggaccctgaccgataggggcattttctataccgcgggaggattgccgcgcgccgatcgcgagctggccgccacggtcgccagtaaaatcaacggctgtatctactgcgcctcggtgcatgcccgcaaagcggcgcagctggcgaaggacgagaccgccgtcgacacgctgctggcggtgacgccgggagaggatctgcgcgacgggcaatcgccgcgctggcaggcggaaatcgacgccgccgccgcgctatcggtgacgccacccgcgttaaacgccgatcatctggcggcgcttgatgagcagggcttagatactctggcccagctggatctgctgcagtccgcggcctttttcgcctgggccaaccgcctgatgctgaccctgggcgaaccctggcgtgagtaggcgtcgttagtaagcttgtcgccgctgatgacagccatagatgagcaaggcgctcatcgccagaaacgacagcgcggcggcggggagcgccacgctgttccagccaaagccctgggcgatcatcattccgccgcagaaggcgccgatggcgctgccgaggttaaaggcgatctgtcccccggccgcccccagcatctcgccgcctttggcgttctgcagcagtaggatctgcagcggcgctgacagggcgaatagtcccgcgcagcagagaaacgccagcgccagcgaagcgactttgtgttcaccgaaggcaaagatcagcagcagcgtcacggctatgaccccgtcggtcatggccgcaatgcgcagcgggctgtagcgcccggaaattttgccgctcaacagattgccgaccaccattcccagccccgccagcatcataatcagcatcatcttgctttcagcaaagccggagacgttgagcataaagggcttgatatagctgaaccaggcaaacacgccggcgttaccgaacatggtggcggcgaaaatcagccacggcgccggggaggccagaaaacggaactgctcgcgcagccgcgtgctggcccggtcataaagcgtgggcacccagcagaagatcgccagaaataccgccacgttaaataccgcgataagcgcaaaggtatagcgccagctgaagtgatgcccaagccaggtgccacccgggacgccgaccaggttagcgatcgtcatgccgccaatcatccccgccaccgcggcggtcaccttccccgggggcgcgattttcgacaggataatcgcgccgacgccaaagaacgccccgtggggaaacccggaaaccagccggccaagcgccagcatggcgtagctactggagaaggtaaacagggtattgccgagaatacacaggccagccaggaacagcatcaccgatttcagggaaaaccggctggagagcagcgccatgatcggcgcgccgatcaccacgccgaaggcataccaggcaatcatattgccggcggcgggaatggatattccgacatcgtgcgccatatccggcagcacgcccataatgccaaactccgccatgccaagtccaaaggtgcccagcgccagtgaaaaaatcgtttttttcatacatcttataggggtattgagagccggccggcattatttactatcccgccccgacacaccagctaaaaacgcccgacggcagtttcctccatacaacagcctgattcgttcatgttccccagccgcgtggcataccggcggcgtggtttcgtagaaacaatcccctatcaaaatcagtgagctcaaagagataaacacctcattgatctcaagttaacttgaggttgtaaagtcaaaacatcgttcaccttgggagaattatccatgcaaagtgttgatgtcggttttactcatgtcgcctttaccgtccgctgtctggccagcagcatcgatttttatacccgctataccgcgatgaccgtcattcaccagcgcgagcccgacctcccctcggcgcggaaagtggcatggctcagcgaccgcacccggcctttcgccctggtgctggtgcaaagtgacgatccggccgatacgccgctgggaccgttcggccatctcggcgtcgcctgcgccacccaggccgagatcgatgagaaagtggccctcgcacggcgggaaggtgttttacgccgggagccggagcagctgggcgatccggtgggctatttcgctttctttgccgacccggacggtaacaccctggagctgtcgtgggggcagcgggtgggactggaagtcatcctggcgggaaaacccggcgaataattttccaccgcctcgccgggggaggattacacttcaaagggatacctcggcaacacggagcatggcgatgggcaacaagaaaagcggtaatccggtcgacacggcgacaaaaatcgcgccgctcgacaacaaagcgtacgagaaagcgctgcgcaaactccacgttgagctggtgaaactgcagcgctgggtagtgcacaagggactgaaagtgtgcattgtctttgaaggccgggacggcgccgggaaaggcggcaccattaaggccatcaccgagcgcgtcagcccgcgtatctttcgggtcgtcgccttaccctcgcccaccgagcgcgaaaaaagccagctctactttcagcgctatatcaagcatctcccggcggccggcgaaatcgtgattttcgatcgcagctggtataaccgcgccggcgtcgaacgggtgatgggcttttgtacgccggaggaggtgcagaagttcctcgacggcgcgccgatggtggagcgcggcatggtcgaatcgggcattattctgctcaagtactggctggaggtctctccgcaggaacaggagcgccgtctgcgggatcgcatcgacgacgggcgtaaaatctggaagctctcgccgatggacattaagtctttcaaccgctgggatgaatataccgctgcccgcgacgccatgttcgccgccaccgataccgcctgggcgccgtggttcgtcgcccgctcggaggataaaaagcgcgtgcgtctgaatatcatcacccatctgctgtcgcagatcccctatgaagctttaccggtggagcctgtgacgctgccgaagcgcaaaattggcaaaatgaaacagactaattttcctttccgctttattccggagaagttttgattatttcccgtcgcgctggttaatgccagcgccaggtttattactataaccatgaatatttcaggctgttacttccctctggaagctgtctcgcaaaataaatattaaacttactgctggtatttattttttagtgggtaaagtcaataatcacagaaccaaccgcaaggagcctatgatgaaaagtaatacgctacgtaaaagacccactgacgtacccgtccagaaggcgtcagaacagccaggtaaggatttacgagaagcggataaacagcgacagcacaaggaattcattgccgcaatgaatgaatttattacaaaaggaggcactcttactgatgatgaatttttcagggtgctatgatgcttgaacaattcaatgtttatcgaaattgttctgctcagacaaataaaaccctgccatattatatgatcgtgcagaatgattattatacagacctggccacgagagtcattattcctttaatgcgaccacaacagttaccacgctggcatcagcatgccgtaccaaggataaatatagaatttgacagctttttactttgtacgccaatgagcagtaacttaaataataaacggatcccgccacaggatttcgtctgcaatctgagtcatgcgcgccagggcgttatcgattcaatcgatacacttatcacgaactgctgactgccgggaacccgctccgacatctccggagcgggtttcgcgccgtgaaggcttacttcatcccttcacgattctctttcatcgcctccaggcgttcgacatcgcgataccagcgcgggtggtgtttcttcgcccagcggcggctcaccttgccttcgatcatgcctttaatcgaccccttcacccagaacgccatatacatatggataaggatggcgtggatcagaatgatggccgacgtcgcatgaatcagcaggctatagcgaatcacctgcatcgggaaatattccgcgaaatatgggcgccagataatcaccccggtcaccagcagcacaaatatcatgctcatgatggtccagaacatcatcttctgcccggcgttatacttaccgacgcgcgccaccttatgctcgttgcctttcagcacctcgacgatgcctttcagccacggaatatcctgtttatcagggatgttatggtggacaaagcgcacgaacataaacatcagcgcgacaaaaatcagcaccccaaagaacgggtgcagaatacgccccatctgcggcgtgccgaaggtttccgttagccactgtagcgtcggaaagaagaacgatattcccgacagcgccacgaggaagaaacagataaccaccgtccagtgacaggcgcgatcgataaacgttgtgcgcacaatcatcttcgatttactcatcatgcttctcctcgtcgtcgtcaacttccttgttcggcccgataccgatgtagtggtaaatcagcccggcgaaggtggcgataaagcccgccgccgccagcggtttcagcgcccccttccacagactgatactggtatcgatctgcggttccttcggcagcttgtgatacagctccggctggtcggcatgatgcaggacgtacatcacgtgggttccgccgacgcccggcgggttgtaaatcccggcgttggcataaccgcgttttttaagcttagccacccgctcctcggccacctccagcatctctttcttcgtaccgaagtggatcgcgccggtaggacaggttttcacgcaggccggttcctggccgacgctgacccgatccacgcacagggtgcatttatagacccggttatcctctttattgaggcgcgggacgttaaacggacaccccgcaatgcagtagccgcagccgatgcagttttcctgctggaaatcgacgatgccgttggcgtactgaataatcgccccggcggatgggcaggccttcaggcagcccggctctgcgcagtgcatacagccatccttgcggataagccactccagtttgccgttctgttcggtctcgctaaaacgcattaccgtccaggatttggcgctgagatccgccgggttgtcgtacaccccgacgcagtgccccacgtcatcgcggatgtcattccactcggaacaggccacctggcaggctttacagcccacgcaggaggagacatcgataagcttggcgacttccgctttatagtcccgcgcgcgcggcgcgggggtgatcgggttggtcgcggagcgtttaataatgtcttgggtttccatcgccattgaatcgctccttacgctttctcgatgttgaccaggaacgccttgtattccggcgtttgcgagttggaatcgccaacgttaggcgtcagggtgttggcgatgtagcctttacgggccacgccttcaaaaccccagtgcagcgggatcccgacggtctccacctgctggccgttgacgttcagcgtgcgcagtcggcgagtcaccacggcaaccgcgcgaatgaagccgcgcttgctgctgactttcacccaatcgccgttagcgatgcctttgcttttcgccagcccttcgctgatttcgacaaactgttccggctgcgcgatggaattgagcaacgcatgcttggtccaggtgtggaaatgctcggtcagacgataggtggtcccgacatacgggaatttatccttcttacctaagcgaatggcgtcctcttcatacaaccgcaccaccgggctggagaccactttcgggtgcagcgggttagtgccaagcggggtttccatcggctcgtagtgctccgggaacggcccttccgccagtttatcgagcgcaaacaggcgacccaacccctcctgctgcatgataaacggcccggtgttgctccctggcggcgcggtattgaagtccggaatatcattcccgacccacttgctgccgttccactggatcagcatccgcttcgcatcccagggcttgccgttgatatcggccgaagcgcggttgtacagcacccgacgattgagcggccacgcccaggcccatcccagcgtattgcccaggcccgaaggatcggcgttatcacgattcgccatctggttaccctgctcggtccagctgccggtatagatccagcaagacgacgcggtgctgccgtcatcgcgcagcagcgcgaagctattaagcagttggccttttttcgccagcaaagtgccattttgatcgtagagatccgccagcgcgtagccgttgttctcttttgccacttcttccgattccggatggtccggctgcttgtagcgccagctcatcttcagcaggggttccgcgcccttcccgccttcggtgcggtacagttcgcgcaggcgatggtaaatcccggcaaggatttcgccatcattgcgcgcttcacctggggcatcctgacctttccagtgccactgcagccaacggccggagttggcgatcgaaccgtcctcttcggcaaagcaggtcgacggcagacggaagacttcggtctgaatcgccgacgggtcgacatcattagactcgccgtggttctgccagaaggtcgaggtttcggtcaccagcgggtcgataaccaccatatatttcagcttgctgaggctgcgaaccactttgtttttatccgggaaggaggcaaccgggttaaagccctggcagatatagccggtgacgttgccgttatccatcatattgaagtatttgataacgtcgtaagcctggtcccacttcggtaaccactcaaagccccagtcgttctctttttgcgccgcctcgccgtagaaggatttcatcaggctaacgaagaatttcgggtagttgctccagtagttcacctgctcgggcagggtcgccttcggcgtgttggcgctgaggtagctttgcagatcggtctgtttgtccgatggcagcgtcaaatagcccggcagactggtcgacagcaggcccaaatcggtcagcccctgaatattagagtggccgcgcagggcgttgacgccgccgccggccatccccatattgccgagcagcagctggatcatcgccatggtgcggatgttctgcgcgccgacggtgtgctgcgtccagcccagggcatacaggaaggtggtggtgcggtccgcggcgctggttgaggccagcacgtcgcacactttaaggaagtccgctttcggcgtaccgcagatgttttcgaccacctcgggcgtgtagcgggaaacgtgctgcttcagcagattccacacgcagcgcgggtgggtgagcgtttcatcgcgtttggcgtagccgttttcatcgaactggtagttccaggacgatttatcgtactggcgtttttccgcatcgtagccgctgaacagcccctcttcgaaggcaaaatcatcccgcaccagcaggctggcattggtgtaatgcttaacgtactcggcattgatcttattgttttcgatcaggtacagcagcacgcccgacaggaaggtaatgtcggtaccggaacgaatcggcgcatagatatcggccaccgacgcggtacgcgtaaagcgcgggtcgacgacgatcagcgtggcgtcgttattgtttttcgcctccatcgcccagcggaaacccaccggatgggcttcggcggcgttaccgcccatcaccaccacgacgttggcgtttttgatatccacccagtggttggtcatcgcaccgcgaccaaatgttggagcaagacttgctaccgttggtccgtgtcagacgcgcgcctggttgtctaccgccagcatacccagcgatcgcacaaatttttgcgttagcatgccggtctcattgcttgccgccgaggcgcacagcatgccggtggaaagccagcggttaaccgtcacgccctgttcattcttttcaataaagttggcgtcgcggtcggctttcatcagtcgggcgatgcggttaaaggcttcatcccaggagatgcgctgccatttatccgagcccggggcgcggtattgcggataacgcagacggttttcgctgtggacatagtccagcaggcctgcccctttcgggcacagcgcgccgcggctcaccggatggtccgggtccccttcgatatggtagatcgcttctttggcgtttttcgcaccgtcgccgaggctatacattaatagcccgcagcccacggagcagtaagtgcaggtgttgcggatctctttcgcacgcagcaatttgaaattgcgtgcctgagccagcgccattttaggggcaaagcccagggcggcggcggtagttccggccataccgcctgcgcagatcttaaagaactttctgcggctgacgtccattgcattcctccatgcaggatgttgattcatcgcgcggaggaaactaacagcaaaatcccgggaaaatttgcgtcaaatcaaggaggaaaaccttcgcccccttaatcgccagccctggccattttcgctaatccctaagggttagcaacggcggaaaatttcgcccctcaccgataaaaagatgatatatatgccggctgcatttgcgtaaccatcaggaaaagcatggagaaaaagagagccacgaccatcggcttcgccgccattatcttatggagcacgatggtcggattgattcgcggcgtcagcgaaggactgggagcggtcggcggcgcggcgatgatttacagccttagcggcctgctgctgatctttaccgtcggctttcccaacctgcgccagatcccgcgtcgctatctgctggccggcagcgtgctgtttgtcagctatgaaatctgcctcgcgctgtcgctgggctatgccgccagccgccagcaggccattgaggtggggatggtcaattacctgtggcccagcctgacgattttattcgccattctctttaatggccagaaaagcagctggctggtgatccccggcctgattctcgccctgctgggcgttggctgggtgttgggcggtgagcatgggctacagcccgatgagattatcagtaacgtcatttccagcccgcttagctatctgctggcctttgtcggggcgtttatctgggccgcctactgcacggtgacggccaaatatgcccgcggtaaaaacgccattacgctgttcgtcctgttaaccgccctgacgctatggctgaaattcctcgccagcgaccagccgccgatgctgtttagctggccggtggtcattaagctgatgacggtctccgtggcgctggggctggcctacgcggcgtggaacgttggcatcctgcacggcaacgtcagcctgctggcggcggcctcctacttcacgccggtgctctcctctgcgctggcggcgatcctgctgagtgcgaccctgtcgtggtccttctggcagggggccgggatggtatgtctcggctccctgctctgctggtacgccacccgccgttagccgagatcgcctcctgctaccggcagcgtcacgccggtgatatagctggcctcatcgctggcgagaaacaggatcgcattcgcctgttccgccagcgtgccgtaccggtgcagcagactgctcgccaccgtctgatcgacgacctgctgataccacgccttttcctgctcgctcggctgctcttcgttacgcggcgtcaggcgcggcggcgcctcggtcccgcccggggccacggcgttaatccgaataccgctgccgctgtactccatggcaatcgagcgggtcagcgcgttaacgccgcctttcgccgccgagtacggcacccgattcactcccgccgtcgccaccgacgaaatgttgacgatgctgcctttgccctgcttcagcatccatggcagcgccgcgcggcagccccacagcgtggggaacagcgagcggcggatctctttctcaatctgctccggctgatattcggcaaaggggcgcgcccagatggtgcccccaacgttgttgatcagcacgtcgatacggccaaaatgagcgaccccggcggcaaacgcctgctcggtactttcccacgcttccagatccgcctccagcgccagcaccagacagccggattgcgccagcgtcgccgccagctcatggacgtatgacgagcgatcgatgagcagcagagccgcgccttctgcagccgcctgctccgccgtctggcggccaatgccctgcgccgcgccggtgatgacgacgactttatcggtaaaacgcattttgtctccttatgccgccgcgctctgactggcgataaatttctcataccagaaccccgccggggtgatcccgcggtcgcgcaacgccgtggcaaccgcgttaaccatcggcggcgggccgcagagatagatgtccacgtcgccgttgttcagcatcgcgtcgtcgagatggtcggtgacaaagccgcgctgcggacaagtgctgttttcatcggccaccaccggtagccaacgataccccgtcagctgttgagtaaaggtatccagcgcgtcggttttcaccagatcgcagtcacgagtaacaccgtacagcagcatcaccggacgctggctgccctgtgtctgcagggtatggagcatggagagcagcggcgccaggccggtaccgcccgccagcatcagcagcggacgttcgccgtggcgcagatagaagctgcccatcgggccgctgagggtaagacgatcgccgggccgcgcccgctgggttaaccactggctcatcatcccgccaggcacgttacggatcagaaaacgcccttcgagggagcccggttgcgagctaaatgagtaggcgcggacatgaggcgtacccggcacctgaatgttgacgtactgccccggcaggaaggccagcggctcatcgagggcgaccaccagttcgatggcggtatcggacagtaaattcacctgtcgtacctgcgccccggtgttggtcagcgcggttttacactgcgcggcggccaccggcacatcgatcacgcagtcgctggtcgggaccatctgacaggtcagcacctgacgggcctgcgcttcgtcgtcgcttaacgcctcgtcgagataatcttcacccaggtcgtactcaccgctggcgcagtggcatttgcaggtaccgcaaacgccgtccgaacagtccatcggcaggtttaccttctggcgataggccgcatccagcaccttctccccggcatggcattgaatgaatcgcgtaatgccgtcctcaaaattaagagcaatattgaaggtcataagcgcctcttaaatgtggtaaacgtcaatcacctgacggatatagtcgttattcaggcgcacggttttacggacgatctgcggcctgccgtcctgctcaattagcgtgcagcaggtagagccaaaataggcatcagtgtgctgatagcgatggctccaggtgacccagctgtaacgcacctccagaccctcgtcgctttcgcccatcagctcaacgttgctgatgatatgggtggtccgcggctctggcgtgctggccccggagcgctcggttttaatgcggtagacgcgatcctccagcccttcgcggttggggtagtagataagcgaaatctctttttgcgggtcgcgggtcagctggtcatcgtcgccccacgccggcatccagtagaccacctgcgggctgtagcagctgagccattcgtcccactgacgatcgtccagcagacgggcttcgtagtagagaaactggcgaacctgttcgaggttaagcatcaggccacctccacgcgctgggtaatggactggtcgtaacgctgttgttcctgttcaatggccgccagcatcagcgtctgccagtggtggtgatgagcgatgtacagcgcttcgtcctccgatttcaccccgcttaaccgcggcgaaaagccagcatgttgcgcatgctcatccgcgccatcgacccagcgcagcgcgccgcggctgaggtcgctccatggcagattttcgccgagatagccgcgctgacaggcgctgaactcttcgaggtcgtccggcgtccccatcccactgacgttaaagaaatcctcgtactggcggattcgcagcgctctggcctggtcggattcccctttcggcgcaaagcaccagatggtgacttcggttttatccaccgcaatggggcggattacgcggatttgcgtcgagaactgatccatcaggtagacattggggtacaggcacaggttgcgggtttcgttgaccatctggtcggcacggtgtttgccaaattccgcctgcagccgttcgcggtgggcatagaccgggcgcacttccgggttgagcgcccgggtccacaacagcatatggccgttatcaaatccatagccgccgccgaggctttttgaccaaccgttgacatccaccgcgtgcgtcccttccgcttcatagttgcggcgtgacatggttgaggcgtagttccagtgcaccacgctgacgtgatagccatcggcgccgttttccgcgcccagtttccagttgccctcatatacatagctcgacgaacccttaagtacctcgagcccctccggcgcctggtcgacgatcaggtcgataatcttgcaggtttccccgagataggcctccagcggctgcacgtcgtcattgaggctaccgaataagaaaccgcgataggactgaaaacgcggcaacttttgcaggtcgtgggagccgtcttgtttaaagctcggcggatagccgccagtgctctcatctttggcctttaataatttgccattattgctgaaggtccagccgtggaacggacaggtgaaagaatttttattcccggttttgcgtcgacataacatggcgccgcggtgagcgcagctgttaattagcgcgtgcagctcattctttttatcgcgggtaataataaccggctgccgtcccagcgtcagggtataataatctcccggctcggcaacctggctttcatgggcaagaaaaacccaatttccttcgaagatatgtttcatttcaaaatcaaataactgctggtcggtaaatatagaacgatggcagcggtaaatatgattttcacggtcgacaactaaggcattattgattttgtctttgagcgtcgagagcgttttttgcatgagtcggtccctcctgcaggattcaggatgaaagaaacagggtgaattcttcgttttcgagtgcaatatctggcccgggcagtagcgtgcccggggccgataatgccgcttactctttggcgcgcacgcggatcccgcgctgctcttcgtcggcgctcagcgctttacacagggtgaaatcaaaacaaacctcggtgtgctctccctcaagattgcgctgcgcgatgatctcgcggtcggtcacttttaccggatcggcaatcaggccgtcgcgggtggcaaaggcaaaatcgtcccacaggtatttatcgccattgaggttaatctggctggtcagatgtttatgacccggcgcggagacgaaaaagtgaatgtgcgccggacggttgccgtggcgacccagtctgtccagcagtttctgggttgggccatccggcgggcagccgtagccggagggcatgatgctgcgcacgctgtagcggccatcggcgccggtgcggatccgccggcgcaggttgtactcactctggcctgggtcgaagaaggaataatttccgagggtgttggcgtgccagatatcaacaatagcgttggccactggccggccttcggtgtctttgacttcaccgtgcagccacatcacttctccggcgtcggcgccatcatccatgcgggcgtgaccctcggccagcggcgcattagccacgtacagcggcccttcgatggtgcgcggggtgccggtttcccgatgcgctgccgcgtcgatggcgtcctggcgcagatcgaggaaatgctccagtcccagacccgccgccagcagcgccgcctcctgacgcccgcccagctcgtgcaaatagtttaccgcgtgccagaactcttcttccgtaacgttatagtcgtcgatgagcgtgcagatattttccagcagacgatgaataatcgccttaaaacgttcatcgccgccggcaacatctaatccggcactgtcgcgtaataatttctgaatagctggctgttgtacgaatacattactcatactggttctctcttatattttgcagggtatacgccggtaataccggcgtgaggtcagatattattattagcgatcgtcatcgcgaattgatgacggatgacgacagagggcttccacttttatcgccataaagggatatagcggcaatcccattaatatttgatgcaattcttcggcatcttgaacatcgaaaatactgacgttggcataaaggccggcaacgcgccagatatgccgccatttgccttcccgctgtaattgttgcgaataggctttttcgcgttgttttatttcctccgcctcgttggcgggaaagccaggcggaatattgacggtcatctccactttaaataacatttttttctcctgttccccgctacggctggcgggtataaaaatgcagtttgtcttcatccagctcgacgccaagtcccggcgtttgcggcagcgccacctgaccgtcggcaaaggtgagcggcacgctgacaatatcgtctttcagcaacagcgggccgaacatctcggtaccccactgcagcggcagcgtcgaccaggcgtgcagagaagccacggtccctacggtgccttccagcatggtgccgccgtacaggccaatccctgccgcctgcgcgacgcgggccagcgccagcacgctgttcggccccccggctttggcgattttcagcgcgtaagcgccggtaaagccctgctgcgccagctgataaccatcgtaggcggtcgcgaccgcttcatccgcgaggatcgcggtttcaatttgctggctaaaccgcaccagggcggcattatcgtgggcgctgaccggctgttcgataagatcgacgcccatcgccgccagttcgcggcagcctttcgcgccggtggcggcgtcccaggcctggttgacgtcgacacggatgctggcgcggtcgcctaacgcttcaacgatggcgcgggtatgacgcaggtcggtggcgagttcacgcgcgccgatcttcagtttgaacgcccggtggcggccttcggccaacagtttctctccttcagcgatatctttcgcggtatcgccgctggctaaggtccacagcaccggcaacgccgtttgcagcgcgccgccgagcagggctgataccggcagacctaaggctttgccctgggcgtcgagcagtgcggtttcgatggcggacttcgcaaaggtgttgcctttaatggcgccgttcatgcgggcggtcagcgcattcaggttatcggccggctgccctttcaacagcggcgtcagataatgggtgatcgctgacaagatggcctcggggctctcaacgccatagctcaagccgccgatggtggtggcttcgccgatgccgcagatgccgtcggaacgggtaaggcgcacaatcaccagcgactggcagcccatggtggtcatcgacaatttatgcggccggatggtcgggacatccacaatccagctctcgatttgctctatggtggcagtcatcttctgttcctgatgagatatataactttttgtacccacatccataacgggggtctgtgccattgacaatagggttcagcctggcggatggtcaacggcgataatcgaaatgttgtgcgattatcgacgcgtttgttaatagacggttattaatgtgatcatggtggtaaaaccggcacaattcagcgcgccccattttgcgcaaggtatagtgatctgccgtgagctttacgctgcaacggagaaggatgcgatgagcgacaatatacccaatacgctgagcgccaggcaggccgagcacgaccctaactttatgctgtctctggcccgcgggcttgaggtccttaacgccttcaccccccagcgccagcggctgaccatttcccagctcagccagaaaacgcaaatctcgcgcgcggcggtacgccgctgtttgtataccctcgccgcgctgggcatggtgcacagtccggatggccgtagctatgaactgctcccccgggtgctggccgtcggccacgcctatctggcaggcacgccgctggccaaggtggcgcagacggcgctggataatcttggcaaagcgctcggcgaatcctgttcggcggccacgctcgacggggataacgtgctctatattgcccgcgcggcggtcaataatttactgagcatcgatctggggcgaggcagccgcctgccggcgtgggccacgtcgatggggcgggtgttgctgagcgcgctgccggaggaacagctggaagtgacgttgtcacgggctacgcttattcgctacactccgcataccctgtgcgatttgtccggtttacgtgcagagatcgcccgggtgcgcatgcagggctatgccctcgccgaccggcagatcgaggtaggcttgtgctcgctggcggtacccgtgctgtcgcgtcacggtcaggtggtggccgccctgaatgtcggggtacctgccgcgacggtcagcgccgcggcgttaaaagagaaggctctcgccccgctacggcgcgcggcgatggatctgtcgctgcagctatagcgccgactgcggtttcgccacggtggcgaggctgcgccagatcccagcggccagcagcagaagcaatacacccgccgtcgccagcaccaggctatgagcctgaataaaagccgtcttcgccgccgccatcagcgcctgcgccaccccggcgggcagcgcctgggacagactcaccgcctcgccaatcgatgacgccgcctgctgcgccatggcgccactcaggccagacggcagcgcaatagaggcgctgtagctgcgggtcaggatcaggccgaacagcgctatgccgagaccggcgcccagctcataggccatggtttcaatcgccccggcggccgccgctttctccttcggcgctgccgccataatcgcggaactggaggccagcagcgcgctggccacgctaaagcccagcagcgtcatcagcccccaggccagccactgctgggtactgaaatcggtcaacgccaggccgagaaagctgaaggcgctgagcagcatcccgccggtcgccacctcgcgcagcccaagccgcgacaccagcaggccggcaatcgggccgctgaagccgctggccaccattaccggcagcataaatatccccgcctcgaacggcgttttctggtgcacaaactgcagctcctgggccatcagtagctcaaaaccgaccagggtaatcagggccgtcatcgccatcatcaccccgcttaagataatgcgatgggtgaacaggcgcatatccaccatcgggcgggccgccgacagctgcttgcggataaaccaggttaacatcgccgccccgccgagcgccaccagcgcggtgagccacagcgccagctggcccttcagcgccgatttcgcgctaaacaccagcatcaggatcgcggcaatcaaaacgagcgcctgcagtagattgagcggctgttcgcggcgcgcgggctggcgcggcaccactttcgcgttaatcgcgataaccaccagcacgatcggcacattgatcaggaacaccgacccccagtagaaatgctccagcaggataccgcccaccagcgggccgaaggccgcgccgccggagccgaccgctgcccacagccccagcgccatattgcgctggctggcctcggcaaaggtgctgcggatcccggccagcgtcgccgggacgatcatcgccgcccccaccgccagcaaagcgcgtgaggcaatcagcgtcatggccgtaggcgacagcgcggcgcacagcgaggcgatgccaaaaatggcgctgccgagcagcagcaggcgcttaaagccgatcttatcgccaagggcgcccatcggcagcaccatgccggccatcactaatgagtagatatcaatgatccacaacagctcattgccgctgctacccagcgccacgctgagggtcggcgcggccacatgcaacaccgtagcgtcaatcgccaccggaatataaaccagcaaaatcgccatcagcgtcatccattgccgtgacatagcttgtacctcaatcaatattgaatattggacacacgtccaggatggcgatcctgccggattgttgaacacatgtccaactttttgttacactcggccaaagccagatgacagtggggttctatgcactatttacaacgtgatgcgcgacgggaagggattatgcaggccgccatgcgcctggcgctacgcggcggctttgccgccatgaccgtgcggcagatcgcccgcgaagcccaggtggccgccgggcagctgcaccaccacttcacctccatcggcgagctgaaagcgcaggttttcatccgcctgatccgcgagatgctcgacatgccgctggtggctgaggacgccagctggcgcgagcgcttgttctcgatgatcggcagcgaggatggccgactggaaccctatatccgcctgtggcgcgaaggccaggtgctggccgacagcgatccggacatcaaagcggcctacctgctgaccatgaatatgtggcatgccgagaccgtcgccatcatcgagcagggcctcgccagcggcgaatttcggtcggctgagcctgcggcggatatcgcctggcgctttatcgccctggtgtgcggcctcgacgggatttatgcgctggacgcgcaggccctggatgaggcggcgtttagccgctatgtaaataagatgattaagctggagttgttttagctatctttacatttagtaacaattaattccgctacgcttaccacgtgctctctgtcagcacgttttttttatctacgcttcatagataacgcaaattaagcgttattcactatccccttgtattcagctgttgaccttatttatttactcctttccgggcaagtagagggcaatatgtcggtgcagaatgataaagataatcattaccttttgaacaactggcggcctgaaaacaaggcattctgggaaaataaaggccaagccattgcgcgaagaaatctatggatatcagtggcctgtctgctgcttgctttctgcgtatggatgttattcagcgccgtagcggtcaatctcaataaggtcggttttcatttcaccaccgaccagctttttttattaaccgccctgccttcactttccggcgcgatattacgggtcccctactcctttatggtacccctttttggcgggcgctactggaccgtattaagtaccgttatcctgatcgtgccttgtatttggttaggagtggcaatccagaatattactactccgttctgggtatttattattattgcgctgctatgcggttttgccggagcgaattttgcttccagcatgggaaatatcagtttctttttccccaaagcgaaacagggcagcgcgctgggagtcaacggcggtcttggcaatctgggcgtaagcgtgatgcagatggtcgccccggcggtcatcttcctgccgctcttcacctttctcggcgtccatggcgtcacccagcccgatggttcgacaatcaccctgagtaatgcggcgctcgtctgggtaccgctgctgctgctcgccaccgtcgcggcatggttcggcatgaacgatatcgccggttcaaaggcctcgattcgcgatcagcttcccgtgctcaagcgaccgcatatgtggctgttaagcctgctctatctggcgacgtttggctcgttcatcggcttttccgccggctttgccatgctggcgaaaacccagtttcccgcggtcgatatcctcaagctcgccttctttggaccgttcatcggcgcgctggcgcgctcgttcggcgggatcatctccgaccgtctcggcggcgtgcgggtgacgctggttaacttcgtcctgatggcgctgtttaccggcctgctgtttctgaccctgccaggcagcggctccggcagctttctcgctttctacgtggtgtttatggggctctttttaaccgccggtctgggaagcggctccaccttccagatgatcgccgtcatcttccgccagctcaccatcgacagcgtaaaacagcgcggcggaagcgatgaagaagcgcagcacgaggcggtgaccgataccgctgccgcgctgggctttatctcggcgatcggcgccatcggcggcttctttattccgaaagccttcggcacctcgctggcgatgaccggctcaccggttggcgcgatgaaagtcttttttgtcttctatgtggtttgcgtgctggtgacctggctggtctacggccgccgtaaacccgcttaaccataacgatttatctgccggatagcggcttacgccttatccggccttacgagttcgttcgctcatccggccgggtggcacgatgccggacatcatcggagcaggagaaatgtcatgagtaaacttctggatcgctttcgctactttaagcagaagggcgagacctttgccaacggccacggccaggtctacaacaacaaccgtgactgggaagacagctaccgtcaacgctggcagttcgacaaaattgtccgctccacgcacggtgtgaactgcaccggctcctgcagctggaaaatttacgtcaaaaacggcctcgttacctgggaaacccagcagaccgattatccgcgcacccggccggatctgccaaatcacgaaccgcgcggctgcccgcgcggcgccagctactcctggtatctctacagcgccaaccgcctgaagtacccgctggcgcgtaaacgactgattgagctgtggcgcgaagccctggcgcagcatcccgacccggtgctggcatgggatagcatcatgcaggatccggcaaaaacccgcagctataaagcggcgcgcggcaaaggcggttttgtccgctccagctggaaagagctgaaccagctcatcgccgccgccaacgtctggaccatcaaacactatggcccggaccgcgtcgccggcttctcgccgatcccggcgatgtcgatggtctcctacgccgcgggcactcgctatttatcgttgattggcggcacctgcctgagcttttatgactggtactgcgatctgccccccgcctcgccgatgacctggggcgaacagaccgacgtgccggaatccgccgactggtacaactccagctacattattgcctggggctccaacgtgccgcagacccgaaccccggacgcccacttctttaccgaagtgcgctacaagggcaccaaaactatcgccatcacgccggactattcggaagtcgctaagctctgcgaccagtggctggcgccgaagcaaggcaccgacagcgcgctggcgatggccatgggccatgtgatcctcaaagccttccacctcgataacccgagcgattactttctcaactactgccggacctacaccgacatgccgatgctggtgatactcgagccgcgcgacgacggcagctatacgccgggccgtatgctgcgtgtttccgacctgcttgacggtctcggagaaagtaataacccggaatggaaaaccgtggcttataacagcgacggcgaactggtggcgccgaacggctccatcggctttcgctggggcgaaaaaggcaaatggaatctcgaacaacgggcagacggcaaagatgtcgagcttaagctgtcgctgctggatattcgcgacagcgtggtgtcggtgggcttcccctactttggcggcaacgaaaacccgcattttcgcagcgtagcgcagtcaccggtgacccttcacccgctaccggctaaacagctgacgctggccagtggcgaaagcggcctggtggtcagcgtctatgacctgattctggccaactacggtctggatcgcgggcttgacgatgtcaatgcggcgaaggatttcgccgaggtcaaagcctataccccggcatgggcggagcagatcaccggcgtaccgcgtcaacatatcgaacaaatcgcccgcgagtttgccgatacggcgcataagacccacggccgctcaatgattatcctcggcgccggggtgaaccactggtaccacatggatatgaactaccgcgggatgattaatctgctggtattctgcggctgcgtcggccagagcggcggcggctggtcgcactatgtcggtcaggagaaactgcgcccgcagaccggctggctgccgctggcgttcgccctggactggagtcgtccgccgcggcagatgaacagtacctcttatttctacaaccacgccagccagtggcgctacgaaaaactgaccgcgcaggagctgctgtcgccgctggccgacgccagcaaatttagcggcagccttatcgacttcaacgtccgtgcggaacggatgggctggttaccctctgcgccccagctcaacgtcaacccgctgaccattaagcagcaggccgaggccgccgggctctcccccgcggagttcaccgtccagtcgttaaaatcaggcgatattcgctttgccgccgagcagccggatagcggcaaaaaccatccgcgcaacctgtttatctggcgctcaaacctgctgggatcgtccggtaaggggcatgagtacatgttgaaatacctgctcgggaccgacagcggtattcagggtgatgaactgggcgccagcgatgaggtaaaacctgaggaagtcgagtggcagaccgcggcgattgagggcaaactcgacctgctggtgacgctggatttccgcatgtccagtacctgtctcttctccgatattgtcctgccgaccgccacctggtatgaaaaagacgatatgaacacctcggacatgcacccgtttatccacccgctctccgccgccgtcgacccggcctgggaggcgaaaagcgactgggagatctacaaggatatcgctaaatccttctcgcaggtctgcgtcggccatcttggcaaagagaccgatgtggtgctggtcccgctgcagcatgattcccccggcgaactgtcgcagccgttcgaggtgcttgactggcgcaagggcgaatgcgatctgatccccgggaaaaccgcaccgtcgattgccctggtggaacgcgactatcctgccacctgggaacgcttcacctctctcggcccgctgctcgataagcttggcaacggcggaaaaggcatttcgtggaatacgcaaagcgaagtcgatttcctcggcaagcttaactacgtcaagcccgatggtccggccaaaggccggccgcggatcgacagcgccattgacgcctctgaagttattcttagcctcgccccggaaaccaacggccaggtggcggtgaaagcctggcaggcgctgggagagtttaccggccgcgatcatacccatctggcgctcaataaagaggatgagaagatccgctttcgcgatattcaggcgcagccgcgcaaaattatctccagcccgacgtggtcgggactggaaagcgagcacgtctcctacaatgccggttataccaacgtgcatgagctgatcccatggcgcaccctctccggccgccagcagttgtatcaggaccatccgtggatgcgcgcttttggcgaaagcctggtagcctatcgcccgcccattgatacccgcagcgtcagccagatgaaggccgtgccgccaaacggctttccggaaaaagcgctgaatttcctgacgccgcaccagaagtgggggatccactccacctatagcgaaaacctgctgatgctgacgctgtcgcgcggcgggccgatcgtctggcttagcgaaaccgacgcgaaagagctgggcattgaagataacgactggattgaagcgttcaacgccaacggggctctcaccgcgcgggcggtggtgagccagcgggtgccgccggggatgaccatgatgtaccacgctcaggaacggattatgaatatcccgggttcggaagtgaccggtcgtcgcggcggcattcataactcggtaacccgcgtctgtccgaagccaacgcacatgattggcggctacgcccagctggcctatggctttaactattacggcaccgtcggatcgaaccgcgacgagttcatcatgatccgcaaaatgaagaatattgcctggctggatgacgaaggtcgcgatcaggtacaggaggcgaaaaaatgaaaatccgttctcaggttggaatggtgctgaatctggacaaatgcatcggctgtcacacctgctcggtcacctgtaaaaacgtctggagcagccgcgaaggcatggagtacgcgtggttcaataacgtggagagcaaaccgggcattggctaccccaaaaactgggaggaccaggatcagtggcaaggcggctggatccgcggcattagcggtaagctgacgccccgcctcggcaatcgggtcagcgtgttatcgaagattttcgccaacccggtgctgccggcgatcgacgattactacgaaccctttacctacgactaccagcacctgcacaacgcgccggagggcaaatatctgccgaccgcccgcccgcgctcgctgatcagcggcgagcgtatggataagattagctggggcccgaactgggaggagctgctcggcggcgaattcgagaaacgcgcccgcgaccgtaacttcgaagccatgcaaaaagagatgtacggccagttcgaaaataccttcatgatgtatcttccgcgcctgtgcgagcactgcctcaacccgagctgcgtggccacctgcccgagcggcgccatctacaagcgtgaggaagatggcatcgtactgatcgatcaggacaaatgccgcggctggcggatgtgcatcagcggctgtccgtacaaaaaaatctactttaactggaagagcggtaagtcggaaaaatgcatcttctgctatccgcgcattgagtccgggcagccaacggtctgctcagaaacctgcgtcgggcgcatccgctatcttggcgtactgctgtatgacgccgaccgcattgaagaggcggccagtaccgaacatgaaaccgacctctatgagcgccagtgcgaggtgttccttaatccaaacgatccggcggtcatcgaggaagcgctaaagcaaggcatcccgcacaacgtcattgaggcggcgcagaaatcgccggtctataagctggcgatggactggaagctggctctgccgctgcatccggagtatcgcaccctgccgatggtctggtacgtgccgcccctgtcgccgatccagtcggttgccgacgccggcggcttaccgagcaacggcaacatcctgccggcggttgagagtctgcgcatcccggtgcaatacctggcgaatctgctgagcgccggcgataccggaccggtcttgcgcgcgctgaaacggatgatggcgatgcgccactacaagcgctcgcaaaccgtcgagggcgtcaccgatacccgcgccattgaagaggtgggcctcagcgttgagcaggtcgaagagatgtatcgctatctggcgatcgccaactacgaagaccgcttcgtgatccccaccagccatcgcgaactggcggaggatgcctttccggaacgtaacggctgcggctttaccttcggcgatggctgccacgggtcagatacgaaattcaacctgtttaacagccggcggatcgacgccatcgacgtcagcggcgtgcgtaagcatggggagggcgagtgatgcggatcctgaaagtgatcggtctgctgctggagtaccccgacgagttactgtgggagaaccgcgacgacgccctggcgctgatcagggccgatgtcccttccctgacgccgtttgtcggtgagctgttgacggctccgctgttggatcgccaggccgaatggtgcgaggtgttcgagcgcgggcgcgccacctcgctgctgctgtttgaacatgtgcatgccgaatcccgcgaccgcggccaggcgatggtcgacctgatgaatcagtatcagcaggcgggtctgcagatcgattgtcgcgagctgcccgaccatctgccgctgtatctggagtatctcagtattctacctcccgcggaggctcgggaggggctgcagaatatcgcgccgattctggcgctgatcggcggccgtcttaagcagcgagcctgcccgtactaccagctgtttgacgccctgctggcgctggctaaaagcccgctcaccagtgacagtgtcacaaaacaggtggcgggagaaaagcgcgacgatacccgtcaggcgctggacgccgtgtgggaagaagagcaggtgaagtttatcgaagataatgcgaccgcttgcgatagctcgtcgatgcaagcttatcaacgacgctttagtcaggatgtggcgccgcagtacgttgacatccgcgccggaggcccgaaatgatccagtatctgaacctcttcttttacgatatctacccttacctgtgcggcaccgtctttctggtgggcagctggctgcgctacgattacgggcagtatacctggcgcgcctcatccagccagatgctggataagcgcgggatggtgctatggtcgaacttatttcatatcggcattctcggcatcttctttggccatctctttggcatgctgaccccacactgggtctactcgtggttcctgccgatgtcccagaagcagctgatggccatgatccttggcggcatctgcggcgtgctgaccctggtaggcggtatcggcctgctgatgcgccgcctgaccaacccgcgaattcgcgccacctccacgaccgcggatattttgatcctgtgcattctgctgattcagtgcgcgctggggctgacgaccatccccttctccgcccagcatccggacggcagcgaaatgctcaagctggtggactgggcgcaggcggtggtcaccttccacggcggcgcctcggcgcatctggacggtgtcgcatggatttaccgcgtccacctggtgctcggaatgaccatctttctgatcttccccttcacccgcctggttcacgtctggagcgcgccggtggaatatttcacccggcgttaccaggtggtacgctcccggcgctgagcgctggcggcgtttaccattcatccttaccggtagcccggacgaggccttcgcgccaagtccgggtatttatcgtacctggctccaggctttatgccgggtggcggctgtcgccttacccggcctacagggtcctctcacaggctcaaacctcgcaggcccgcgcaagcgcagcgccgccgggcaagatatcagacacggtatctgtaatttcgccgggtggcggctgtcgccttacccggcctacagggtcctcccacaggctcatacctcgcaggcccgcgcaagcgcagcgccgccgggcaagatatcaggcacggtacctgtaatttcgccgggtggcggctacgccttgcccggcctacagggtcctctcacaggctcatacctcgcaggcccgcgcaagcgcagcgccgccgggtaagatatcaggcacggtacctgtaatttcgccgggtggcggctgtcgccttgcccggcctacagggtcctctcacaggctcatacctcgcaggcccgcgcaggcgcagcgccgccgggcaagatatcaggcacggttcctgtaatttcgccgggtggcggctgtcgccttgcccggcctacagggtcctcttacaggctcataccccgtagacccgcacaagcgcagcgccgccgggcatgaggagatttacttcccggcttccggatgggtatcgaacgccgccatcaccgccgccagcgccgcttcgctgaagccatgtttaggatcgtccacccccaggccgaaacgggtctgcagcgcttcatacagcgcggagacatcggcaaaatcgaccttctccaccacatggttattctcccagtgggtaaagtggaagttggtgagggtcattttgccgccgtccgggagatgacgacacatcagcagatggtgacggaagtgggactgcggccagtgcgccgaccagaaattgcccatcacataatcagacgcatactggcggcctaaatcgaaatggtacatcgactgccagtgttcgtgatggttgaactgcagcgtccactcatccccttcatgcaccagacgatagctgccgtgcggcgtttgctgtgggatatcggccagcagtttgatcggcgcggtcagcgtctggccgccgaagccgacgtcggcgatccagcgctcccccgccacctccaccagcaacagacggtgagtacgcggcggcatctgcggcgggttggccagcaccacgcggcccagcaggctgcggacgttaaagcctatttcgcgcagcgcgcgctccagcaggccattctgttcaaaacaataccccccgcggcgggcggcgatcagcttctcttccagcgccccatcgtcaaggtggatttcacgcggcagcaggacgtcgaggttttcaaaggggatggcgctgttatgctgcagatgcagttcccgcagggtatcaatggaaacatcaggctcacccgtccagctcagacgggaaaaataggcgcgtaaaaagggactcatcagggcctccagctgtaggtgtccgacatttatagcctatttttccgcgccgaccgtcttttttgtgcgcttagcgttaaccgcgcgtgcggcgctgcatcagcgccagcgccgtcagcatcaggaccagaccggtcaacaacgtcaggctggccatcgccatgccctgaccgacggaaccctgttcgaactggcgccagataaacaccgccacggtttgcgtaccggccggagagagcagcagcgaggtcaccagctcccgggaggccaccgcgaacaccatcagcatcgccgccagcagcgccggaaagaccagcggcaggacaatcaaccgcagcgcctgcagtggcgacgccccgtgcaccctggcggcgggctcaaggttcgggcccagctggcgcagcgcgctgccgacatagcgcaccggccagggcaacagcaggcagcaataggagagcagcagcatccacagcgtgttatagggcgagcgcggccagaagggctgattccacagcaggatcaaaccgacccccaccaccacgcccggcagcgccgccggcatcagcgacagcgcgtccaccatcccgcgccctttaatcttctgcaccatcaccagccaggcggccagcaggcccagcgcgccgacgattagcgccgaacccagggccagcgacaggctggtgccgagggccgacagggcatctccctgctggtcaaacagcgccgcgaaatgacgcagcgtgacattctcaacactcacgccaccggagagcgtgcccatcacgctggtgagcatcatcgagacggcggggacgccgaccgccaggccgccgacggccgccatcgccagcacggcgggcagcatcatccagcccagcgatgccccgtggttctcccccggcttaccggtgacgctggtgacctctttctcccccaccagccgcctttgcagccaccaggcgaataacgccaccgccatcagcagcagcgacaatagcgcggcgccagggagatccaccggccagtcggccagctttttctcaataccgaccgtcagcatcaccactcccgcccggctgcccagcgccgccggtacgccaaactcctcgatagcgagggtaaacgccagcagcgtgcccgccgccagcgccggggagagcatcggtagcgtcacgtgccagaaggcgcgccaggcgctggcgccatggacgcgggcgaccaccgccagccgggtcccgctcgccagcaggctgcgggagacggcaaagtagaccaccggaaatatgttaaaggtcatcaccagcacgatcccgctgcggctgaacagcagatcgttcagctgccagccggtcagctgctgcagatagccctggctttgcagggccagcatccaggagagcgccgagatatagggcggcgtaagaaaggggatcaaaaacaggagatcccacagccggggcagcggcagcgaaaacataccgcgcaggatgccgagcggcaggccaatcattacgctgaccagcgccacgccggcggcgatccatagcgtaccgccgagcatcgccggcagctgaggatcggccagcagcgccgggatgccgccaaaggcgtccccgagcgaaccggcgctaaaatggggaaaaatcgcctgcagcacaataaacactaacggtaacgcgaccagcatcaccagggcggcaagggtcgcgccggaaaggaatgtttgtttcacaaccggttcctgaagctgagggtcctccggcggccagcgccggagaaacgggatcaattactgcgcgtacagctgactgaagcgggcgagcacggcgccccgctcgctgctgccctcgctggtggtgggtagcaccttcagcgcgtccagtagcggacgtttagccgccacgtcgcggcgggcgggcatcagccaggcgtcggcgaccttcgcctgaccttccggcgacagcacgtaatcgataaaggctttggcatcgccgggatgctggctggttttgaggatcatcatcgggcgcggggcaatcactgttccgctggccgggaagatcaccttcagcgactcgccctgctgaatgttgccgtaggagacataatccaccgcgccaaacaccgccgctttcgccccctgcatcaccggcgtcaccgcctgggcgttgggtccgctgactaccatgccgttctttttcagatcgtcaaacagttgccaggcctggtcgcccatgctgttttgcagcccgatcagcaaatccagcgacgcgccggagagcgccgggtcgggggttgtcaccttgtctttaaacgccggctgggtgagatcccgccactctttcggttccggggtgccgcttttactgttccagacaatacccagggcggagacgccctgggcgatatagtccgccgatttcaggttcgccggtacctggtcggcgttggcgctcgcaaaaggcaacaaccagccccgctggtggagatcttcggcggtatcccacgaggcggagatcagcacatccgcctgcgggttggcctgctcggcctccagtcgggccatcactttgccggtggtggcctgaaaaacggtcaccttcaccccggtctgttgttcaaaaccgctggccaggcttttcgccagcgagccgggtccggcggtgtaaacggtcagcgcatgggcgctggagagcatcatggcggagagagccatcgcgagtaccactcctttcttaacggtcataacggtgttcatgcaacttcccctgaggttggcgtaacggcgcggacagcggccacgcggcccgcggataaatagacaatctggtcggctaacagctcggcttcacgtcggtcatgggtgacatacagggcggtgatgccgagctgtcgcagcaggcggctcatttcgccacacagcgattcgcgcagttcgctgtccaggttggagagcggttcatcaaacagcagcacccgcggcgcggcgacgatcgcccgcgccagcgccacccgttgctgctgaccgccggagaggcctgaaggcttacgttcggcaaagccattgaggcctacccgcgccagcgcctcgctgacccggcgctcgcgttcgctgcgggagacgccgcgcatgcgcagcggaaaggcgacgttctgcgccacgctcatatgcggccagagggcataatcctgaaaaaccatgccgatatcgcgctgctccgggggcaatccccatcctgcgcgggcgaccagcctgtcgccaaagcggatttcgccgctggccggcacgctcagcccggccagcagacgcagcagcgtgcttttgccgcagccggaagggcccagtagcgccacgatgcggccgggttcgatatgcaacgtgaagcggtcaagaatggggggctctgcgaaggcgaaagagacctcctgcagggtgataggggtcagcgtgcgcatcatcgccctccctttcgggacagcgagaccagcccggcggtcgacatccgacggggcacgctcacctgggatagcatcaggggagccaacatattgtgatcctctttgggacttagtgctggcgactatagtcagacgagatgacgtattgattacattttcattgcggcttaacgtgttacctgccaaccgacccattattcaaggaacgcctatgagccgctttcgccacgttgaactgcagtacgccagccgcctgctcaaccacggcccaaccattttgatcaccagctacgatgccccgtccgaccggcgcaacgtaatggccgccgcctggtcaatgccggtggaattcgccccgccgcgggtggctatcgtggtggataaaagcacctggacgcgggagatcatcgagcgcaatggcaccttcggcattgtggttcccggcgtcgcagccgccagctggacctacgccgtcggcagcgtcagcggccgcgatgaggacaaattcaatgcctgggggatcccggtagtaaccggtccggagctggggctgccgctgatcgaggagaaatgtctggcatggatggagtgccggttgctgccggcgacggcggcccagacccagtacgacaccctgttcggagaggtggtctctgccgccgccgatgagcgcgcgttcgtcaccggacgctggcaattcgacgacgataagctcaataccctgcatcatcttggcaccggcaattttgtcgccagcggccgtcatgtacgggcaaactccctcgacgaataagagtgacttgccgcgggcggccggtttttcccctgcccggcctgcggcccccttttaacccggtgggcggcggcgatcggcgctgggggtcaggccaaacacttttttatacagggtggtaaagtggttgctgttggcgaagccgcacagataagccacttcggtaatggtcatctccgtttcgcgtaatttgacccgcgcggagaccagccgcagacgtttcagataattatccggggttaatccggtggcctctttaatatggcgaaacgcggtgcgggtggtgagatgaaattgctccgccagctgctgccagttatgttcttcgaaacagtgctcctgaagccaggtgagtaatttatgcagtttatagcgagtgctgctatattcggcttccgactcggctgtgagaatggtggtcaccagctggaaaaagagagactcccgtagcggggtattatccgccgccctcagcgccggggaaaatatcttttccaccagttcccggcaatagctgcgagtctccggcgctagccagccatagcaggcggcgcgctgcgcggataattgctgcagcaatccctccatctgctgtaaatagccaaaggccaccgccggattaattaagacattaatcagcttcagcgtccccagctcatcataataatgcacatcgccaggctggacgtaaaatacgtctccctgttggatatacagcgggcgaccattaataacgtgtaacccatgcccctcctcgacgatcaccagttcggcaaattcatggccgtgctcctggctattatcctccgggtcactggcgtacatgccgagcttatcctgggaatgggtgaaataatactcaacggtcagtgtcatcattacagcaaatcctgaacaacctatggcgcaggagcacgataatctattccggccctcggcacgcgcccgatgtgcggatttgtgatcgccagcgcccccacctcattattcctgccattttcactgacggtttggcattgccagagtggtagccgcgccggacgacggcctatgctgcgcctaacctaacggagaggacgcagtatgtcacaagcaattcaatacaattccagcgtggcgatgatccgtcacccgcgctttttacagcgtgcggccgacctgacgcccgcgctgcaacgcctgcgccagacgccgcaggccatcgtcgaggccgtcgctgaaccaggagcgctgaacggctggcgggggaataccgtctgcacgccggagcagttttatcagcaaccgctcaacgtcggcgacagcatcattattgattttggcagccattttgttggctacctgcagttcagctgccgcagcgtcggcagcccgcccgatgccccggcccatctgcacttctccttcggcgagacgctgagcgaagtctgtgagccgttcagcgaataccagggatggctgagcagcagctggttgcagcagcaggatctgtggcttgacgtcctgcccgcccgggtcgctctgccacgtcgctattgcctgcgctacctgaaggtggaggtcaaagcgctgtcgcgcaagtttcgtctgcagttcgatgagatcgctctggaaaccgtcacctctgccggcagcccgcacccggcggtcatcgccgatctgcagttgaaagccattgatgacgttgccgttcgtaccctgaaaaactgcatgcaggaggtgtttgaagatgggccgaaacgcgaccgtcggctgtggctgggcgacctgcgcctgcaggcgcaggtgaatgacgtgaccttcggccaccacgatctggtccgccgctgcctgtatctctttgccggccatacccgggaagatggcatggtttccgccaatgtctttgttcagccagaggtacgcgccgatgacacctttctgtttgattactcattgttttttgtcgacgtgctttataactacctgcaaagcaccggcgacacggaaaccgtcggtgagctgtggcccacggcgcggcggcaaatcgagctggcgctgacccgctgcgattctcaggggctggtgcgcgacagcgatgactggtgggtctttatcgactggcaggcggagctgaataaacaggcgtcggcgcagggggtgctcatctactgtctgcagcgagccctctggctggcgcagcgttttgaaccgcagcgggtacccgactacactgccacgctctggcagctgaaggaggccgccctccaccacctgtgggacaacgatcggcaggtgtttatcagcggcgccgtgcgtcaggtctcatgggcgtcgcagatctggctggtgctggcggaagttggcaccgccgggcagcgtcaggcgctgatgcgccgcctgcagcagcagccgcccgccattgccatgaacaccccgtacctgcgtcatcatcacattgttgccctgctacagtccggcctgcgcgaggaggcggtgacggagatcaaagcctactggggggcgatggtcgcctacggcgccgacaccttctgggaaattttcgacccccaacatcctgacttttccccgtatggcagtaagcttatcaacagttactgccatgcgtggagctgtaccccggtctggtttattcgccagtacggactttaacaacaacgataagcgagtgatttatggcagaaacaacgtttaccctgtggcggcagcgccttggctatggcattgccgatctctcctgcaaccttgtgtggcagatgatctctctgtagctgatgttcttttacaccgacgtcatgggtctcccggcctattatgtcggcctgatgttcctggtcacccggctggtagacggcgtggccgacgtgctgatggggctggtgatcgacaataccaccacccgctgggggcgctgccgcccctggctgctgatcggcgccctgccttttggcctgctgtgtattctggccttttatgtgccggatttcggcaccaccggcaaactgctgtacgcctttgtcacctatctgtgtctgtcgttcctctacaccctggtgaatattccgttctgcgccatgctgccgtttttaaccagtgattccgcagaacgcaccacgctgtcggcggtgcgcattttgctgggctcccttggcgccaccatcgtcgccgtggctacgctgccgctggtcggcatgctaggcaaaggcaaccagcagcagggattcctctataccgcggtgatttttggcgtactggcggcctttttcctgctggtgagctttcgcaacgtcgaagaaaagatcacccttaccggggagcgcatgaccctgaaacgcgcctggattagtctgcgcgccaatcgtccgtggtgggtcttcgccagcaatatctttctgatgtggggtgcctttttctttcagaccggagccctggtgtacttcttccattattacgtcgggaataccgagctgacggcggttatcgccgggatctccaccttcgttcccctgctcggcaccctcaccgtcccgctgctggcccgacgcatgaaaaaacgtcatgtctatctggtggccagcgcggtcaatctgctcgggatggggattatgatggtgtctggcgcccacgttctgggactgatcgtcggggccgtgatcctctccctcggcgccggccaacgcacggctatctatttctcgatgcaggccgacccggtggattacggcgtgtggaaaaccgggattaataccgcagggatcctgacctcgataaacggttttctcggcaaggtggcgatggctggtgccggggctatcaccggcgtgctgctctcctccagcggctatatcgccaaccacacgcagagcgacagcgccctgttggccatcaaggcctgctatctatacattccggcgctattgatcctcgcctcgatgctgtggatgggccgcttctaccgcctcgacgatcagtatgagcagattcgtgccgaccttgatgccggacgcggcgcctcgccagccccggccccgaccgccggagaatcccccgccatgtaaggcgcccccgctgatttaacctctggataaattaaggatttttatgcgtatctctgtgattagcgcagcggtttgctgcgccctttttccgctcatcagcgtcagcgccgccggcttgagcgtggagcaacggctggcgcagctggaagcgcgcctcaatctcgctgaacagcaggccagcgaggccagccgccgcgcgcagcgggcagaacagcaaactgccgccgccgagcagcgcgccgcggcggcggagcagcaggtgcaggcgctcagccagcagaccacggctcgcgaacaaaaacagcaggccactaatcagcaactgagcgagcagctggcgaagcgcgccccggacgatgggtttacctttaacgcctacgcccgttccgggatgttagtcaacagccatggcaaaggcgcccgcggcgggccaggcgtctccccggccagttcgctcaacggcgatgcccatgtcggtcgtctcggtaacgaaaaagataattacgctgagctgagcttcggcaaaaagctcaccttcaacgatggctcatgggcgcgcttcaagaccatgctcgccgacggggccaccaacccggatccgtgggttcaggataacgacagccaccatctgaacattcgtcagctgtacgtcgagatgggtaactttgccgaattcaccggtccgttaaaacgcgcctcaatttgggccggcaagcgcttcgatcgggataacttcgatatccactttaccgatagcgacatcatgttcctcggcggtaccggcggcgggatcaatgatgttgactggggaagcggcctgcgcggcgactattcggtgtatgcgcgtaacttcggcgaccttggcagcgataattacgcggataatgacatccagaatctgctgttcaccgccaaccatttttacggcaactggcaactgatgaccacggtgatgaccgcccagggcaacgatgacctgaaagataatacctcgaccaccgggagctatgccctgcgcagcgataacaccgccaaaaacggctactacgcgatgctggccctgcacgacaaacagcagttctacggcctggcgccgggggtgtctgaaagcgccctgcaatacggcgtcgggctgggcgccgaagcgcgtcagccggggagcgatggcgatctgaccgagaacgcggcctccctgcgctttgcgtcgtatggcatcctgccgttggggaaaaactggcagctggcgccgtcggtgatagcccagcatagcgaagaccgctatcgcgacggcgaccgctacgactgggcgacgtttaacctgcgggtatcacaggggatctccgctcacttcgccctgctgtatgaggcctcgtggcagtatatggatctcaatccgaacgggcgcagctatcgctataatgacaacgtttatcagtatcaggcggtgcgcggtgatttctacaagctgaccttcgcccccacctttaaagtgggcgatgtgctggatatcaaggcgcggccggaaatccgcttctttgccacctggatgaactgggataaagcgctggatcgctacgcgataaatgacgatttcggcagcaaaggctttaccgccggtgggacatggaacttcggcgtgcagacggagatttggttttaatcaaacggcccgtccggctcaaatgccaggacgggttgatttaaatacacgctgttactttgtcactatgccagtgctgtatgaagtaatataaactcataaaataaaaaccataacaggctaaaaagataaaggttgtttttataattccaacaagtgactttcgttttttctcaacgatgagaagatcgtgaaacctttcttgctgttgttctggtgttaaattatcaactattttattttttatatcatcgtgaatctttttaaacgttcgcttttcacctggaaagctaccgtgtagaagaaacaaaaaaaataaagaaaagcataacgaatgctaatatccgaatactgggctcagttaccccccagcatccaagggtagcaataaacaaccagataccatgagtgtttgctcgcgctctaaacctatcaatatgagcgctgtatttcttgatttcttacaaaatagaatcgctggtttccatacgtaatgcactcctttttaaaggccccggttacgaaagagggcaaactctgccattttccttgcgaagaataacctttcaaacaaccttcaacaagttgataatcaatggattaccctgaagcaataaaagcagttttctggctgcaccggttgggtgacgtcgtttcgtttcccagcttttaaccaactcgtagctaacgccaacggccgctgcaaagtcctgctgttttaaacctgtggcttcacgtatcgctttcacgtcaatttcgctgaaggtatgaacgtgctgctccatcggcatttgttcacctttctcgatcctgaccatttcttctgcactcgccagcagatcggcaaacaattcgtctttcatacccacctcggttggctctctggcgcttaggatagatgaacatgctgtttctctcagtgcgtcgccggagaagcccctccccgggggcggcgcaaagcgccttgcccgggctacggaactgcagaccgctgagagcgcgtagcccggacaaatgcgcagcatcgcctccgggtgtcgggttacatgctataacccggcttcttaatcaactgcgccatctgcggggcgatctcactgtcccacacggcctgccacgcgtccggctcaacctgagtgagtgcgacgctgacggcgctctctttgctgttcagatggcggatcagcacctcagtgatgtcggcggccagcgcggttttttgttcatcagtcagttcacggggaaaacatttaatatcaacatgcggcatagcaaagactccttgtgatcagagccataacgctaccacagaatggccgttctggttggcatcgcgtgcgttaaatcagcttgttacggcgtagcgccgcggccagctccggtcgctgacagaccgcccgggcgatggcggcgaattttggcgcgtggtcgtcaaaccacgcctggcggggtccccagcggtacatcgccgcgatatagcaatccagcaacgttaccgacgcgcccagcgcccacggcccggcggccagctgctgttcgaaccagagatagagatttttccggtactggcgacaattctccaccagctgctccgcggcggcgggcgcccagcgttccgggtaatcggcataggtaaaggtaggatagacattggccaccagccagaccagcaggcgctgaaactgcggacgctgtggcgtccccggcgcgggggccagatcgggacgctggtcgaggatcatcagcgcgatggcggcggtttcggtcatgatgctcccgtcggccagcctcagggtgggcacctggcacagcggattaatctgtcgcagacgctcgcgcgccggaccgggctggtcaaagccctccacgtcaaccacctcgtagggaatatcggccagggagagcatcagctcgctaatcgtcgagccccatcccggcacgccataaacggttatcatggtctgcctccagggtaaagcctaagtgtaggcagaaatttgccgctcacccacccggcacaccatgccactgggggttagtaggttatccccggcgggttgaccaccgactgcgccaccgcttcgccctgctccccccaacgcgccagcacctgctgatattcaccgcgggcaatcgccccgtcgagagccgcctgcagggcatagaccagaccgttgccttttttggtggttgtcgccacccacgcttttttcggccccaggcccaccacccgggtctggccgttaagcgccgctttataggctgccaccgactgcgggccgaaaaagatatccgcccgcccggactggatatagaggttgccggaggcatcatcggtcaggtagaccggctgggcctgcggccgtccggcggcgcggttgtcctcgttccagcccagcaggatccgctcctgattggtgccggacccgacgatcactttgcgccccgcgagatcggcgggtccgtttaccgcggcgatatcgctggtggatttcaccgagaaggccagggagtccacccggtaagtcgcaaaatcgaacttctctttgcgcttctcggtcaccgcgatattgatcagcgccacatcgtagcggccggaggcgatgcccagcggccagtcctcccacgcggtgggcaccagcctgagcttcaggccaaggcttccggccagcaggcgggctatatccgggtcgctaccgatccgcgtgcggttgtcgctggccagcagggccagcggcggcgaattgagcgccgagatcgccaccgttagcgtccccggctcgacgaagcgatagcccggcggaattttcgctatcgcctgcgggtcgcgggtgaccggcaatggctgctcattggcgcgcagatccagcgccgcgtaagcgctcatggcaaaagcgctgagaacaagggtcattagcgctctgttcatgacggcagcaccctggataaaaactgccgggtacgcggatgctgcggatggttgagcacctcgtcgctgctgccctgctcgacgatcctgccgtcgaccataaacaccacctggtcggccacctcgcgggcaaagccaatctcatgggtgaccaccaccagggtggtgcccgatcgcgccagcttcttgatgacatccagtacctcgcccaccagctccggatccagcgccgaagtgggctcatcaaacaggatcacccgcgggttcagcgccagcgcccgtgcaatggcgatacgctgctgctggccgccggagagatgccgcgaccaggcgtcggctttattgcgcagtccgacgacgtccagtagctcataggcgcgggcaatggcctctttgcgcgtgacctgctggtgggcgatcggcgcctctatcaggttctccagcaccgtcaggtgcggaaacagattaaagttctggaacacgtagccgacgttgatccgctggcggaggatctccttctctttcatctcatacagcttgtcgcctttgcggcgatagccgatatagtcgccgtcaatctgaataaatccctcatcgacccgttcgaggtgatttatggtgcgcagcagcgtggacttgcccgagccggaagggccgaggatcaccgtcaccgtgcccggggggatctccagcgacacatcgtccagcgccttgtggcggccatagtatttgctgaccccggtcatagagatatggccattatgagagctgggcatgaacggcctcctgcggctgtggttgacgtgcgggttgattcagacggctgctgcgggcgctgtttaccgccgagcggcgctcgctgcgcgccaggccccgttccaccagatactgaatggcggagaggacgctggtgatcgccagataccaggcggcgccgaccatcaacagcgggatcacctcctgggtacggttgtagatcatctggatggtgtagaacaactccggcatcgccaggacgtacaccatcgccgttcccttggccagactgatgatctcgttgaagccggatggcaggatggtgcgcagcgcctgcggcagaataatgcgcagcgtgcgccgccaggcgggtagccccagcgcggcggcggcttcatactgcccgtggtcgacgccaagaaagccgccgcgaataatctccgcggtataggcgctctgcaccagggtcaggcccaccaccgccgtggagaattgccccagcacgttaatggtctgatagctggcccaggtgacgccggtaaacgggatccccagcgacagggtgtcgtagagataggaaaagttatagagaatgatcagcaccacaatcagcggcagcgagcgaaacagccagatatagccccaggcgagactgctgagcagccacgatgaggacaaacgggccagcgccagcaggccgccgaagatcacgcttagcaccgtgccgagcagggtcaggagcagggtttgccccagcccctcgaggatcaccgggtcgaagaaccagcgggcgaagacgccccactcccagcgcgggttaaaggccaccgactggatcaccaccgccagcaccagcagggcgaccagagccccgaccacccgcagcggatagcgcgccggcaccactttgatcgtttcagatgaatgcataatgcctcctcaggcgctgtggctgtaggcgctcaccgccagcgctttagtgaaccgcagccggccatcgtacggcggctgactgtactcttccgggtctcgcgtgagatcaaactgcgcctcatacccctggctgagatagagctttaccgcctccggctgacggaaaccggtggtcaggtagatatggctgtacccggccagcaccgcccgtcgttccagctcctggaccaccttcgccgccagcccctgctggcgcagacggcggtgcgtccagatacgcttgatctccgcggtgtggcgatccttcggcttatacgcgccggtggcgataatttcgccctcacgctcaaggacaataaacagcccctgcggcggcacataccactcacttaactccacttccgcatcgcgggaaaaatagtcgccgtagcgggcggcatattcggcaaacagcccgctaataatcggctgcagctccggagcctccggagaaatatcgcggaatgcttcgctcatcgcgcctcctgtcagtcgcccagtccgggcggattgatttccgattgcggaatgctttccaccccttcgccccagcggttaagcactttggcgtagtccccgctggcgatagccccgttcagcgccgcctggacggcattcaccagcccgctgtcttttttcagcgttaccgcgatgtgcgccgcttttggccagccgccatcgacgctgcccaccagtttggttttgccggtcagcgccgccttccacgcgccaatcacgttggggccgaagaaggcgtcggctcgtccggtctgcagggccagcgtctgggcggcatcatccttggtgtagaccgggataaacggcttcagccccttcttgacgttctccgcgttccacgccagcaggatcgcctcctggttggtgccggagccgacaataatctttagcccggcgatatcttccgctttgtcaatcttgctcagcgggctggtgcttttgacgtagaagcccagcgagtctttgcggtaggtggcgaaatcgaacttctctttccgctctttggtgacggtaatattgctgatcgcggcatcatatttgccggaggtgacccccagcggccagtcttcccatgaagtgggaaccacgtttacttccagcccgaggctctccgccaccagccgagcgatatccgcctcgctgccgagcagggttttgttgtcatcggcaaagaccgtcagcggcggagagttcagggccgccaccgcgacggtgaatttccccggcaccgccagatgcagatcttgcggcaacagggcaatggcctgcggatttttcgctgtgtgaatcggcgttttgttggcctccaggctcactccggtgccattgatcttgacgtcctgaccccacgatgaggcgctaaatgccaacgcgacggccagcaagagtgttgttttctgcatagcgtgattctcttttattatttttggaattgattagcgggtagcgccagacccagactttcccgcagggtggtgcccggatagtcgcgacggaacagtccgcgcgcctgtaacagcggaaccacctcatccacaaagcgcgggaaggtttccggcgtgccgccctgaataatgaagccgtccgccgcgtgctgctcgaaccacagttgcaggccatcagcgacatcgctggcggtgccggtaaagcgcggacgcgggctggctgcctccagagccacctggcgcagggttaagccccgctcgcgggcgtgacgtttaatctcgtcggtggtactgcggaagctgttttgtccgaggtcgccaatatccgggaacggttcatcaagcgggtactgcgaaaagtcatggtgttcgaaatagcgcccgagataattcagcgcatcttcgatggagaccaacgccgcggtggtctggtactgccgctccgcgtcctcggcgtcatccccgacgatgacgctgacgccctggaaaatatgcagttggtccggactgcgctgatatgcggcgagttggcttttgacatcccgataaaatgcctgcgcctcggccagcgagtcctgatgagtaaaaatggcatcggcgtggcgcgcggctaattttttgccgtcatccgacgcgccggcctggaaaataatcggtcggccctgcggcgtgcgggcaatattcagcggcccggcaactttaaagaaatcgccgtggtggtcgagcgtatgcagtttatttttatcaaagaactggccagtctccttattgcgcacaaaggcgtcttcttcccatgaatcccataagcctttcaccacctgcagatattcatcggcaatgcgatagcgcagcgcatgatccggatgttgggcccgggagaagtttttcgccgacccttccagcggggaagtgaccacgttccaccccgcccgtccctggcttaaatggtcaaggctggcgaactggcgggcggtagtaaacggctcgctgtacgaagtcgataaggtccccaccagccccagtcgccgggtgatcgcggccagcgcggaaagtaccgttaagggttcgaagcgatttaaaaaatggggaatcgatttttcgttaatatataaaccgtcggcgacaaaaataaaatccagcttccccgcttctgcttttagcgccgtctgggtgacgaaatcaaaattaatactggcgtccgcctgggccgccggatgacgccaggcggacatatttcccgatgcgccatgcaatatggttcccagacgcaattgtcgattttcagacatagctaccccttcccctgtcattcgttaaatgtgttgtaacgcttcttccgcgagacgggcgaaatagtgcgccgcgggcgcaatcagccgttcatccggattaaatgccggatggtgcaaaccatattcgctggcgctgccgatgctgacgaacgccccgggaatatgctgaagatagaccgcaaaatcttcgccgccgagatgcagatcggcatggtgggtgcggtacccggcccgggctgccacctcgctggcgaagtcggcccagcgggcgtcgttgaccagcgccgtcgggccggcgtaccagaagacgtcaatctgcgcgccaaaggcgctggcgaaaccggcggcaatctcgctgacccgggccttgacccgctgctgcacttcactgctgtgggtgcgcagcgtcccctccagctcgacgctctccggcagcacgttccaggtattgcctccctggatccgcgtcacgctgagcaccaccgagtcgagggtgttcacttcccggctggccacgctctgcagcaccgtcaccagctggctggccagcaggatcgcatcctttccttcatgtgggcgggcggcatgcgcccccttcccggtcactttgaagacgaagcgatcgacgttggcgtagaacgcgccgccgcgggtggcaaattcgcccaccggcaggccgggctcattgtgcataccaaagatcgccgacacctcctccagcgccccggcgcggatcagggttttcgccccgccaaaattttcctctgccggctgaaacaggatccgcacccgccccgggagttccgcttcccgctccttcagcagcagcgccgcccccagcatcacgctggtgtgaatatcgtggccgcaggcatgcattaccccttgattctgcgagcggtaaggcagaccggtcgcctcctcgatgggcaacgcgtcgatgtccgcccgcagggcaatcaccttgtcgccgctgccgacttcggcgaccagcccggttttcagatcgtagggcagcagggtcagcccgccgctctgcagccagtcgcggatccgcgcggtggtggccacctcctgcagggagagctccgggttctggtgcagctcgcgccgccagctaatcagttgttgttcaaaggacattcagcacctccttgccgtagtgagcctgcgccagcaggcgcagggagtgcaggcgcgctggcccgtcgctaatgggggtatcaatgatgagttcatccaactgttcttccgcctgcagcgcgtcaagccgggctttaacctgttcgggagtaccggagatcagcgaagattcacggcgggcaatgcgcgtcggtcggctgccggcctggcgggcaaaagcgacggcctgcgcctcactgccgacggtcacccgctggccgttctccagctcgacgccccacacctcgacctgctgcgccagcgcggcggcggtggccggatcgtcagcaaccaccacctggacggcgaccatcgcctcacgtgggctgagctcgcgccagcggttgaacacggcacggcgcagcgcgctgtcgccattgagatgggcggcaaagacaaagttccagtcaaggcgggcggccagttcagcactctccaggctggcgccgagcagaaaaccatctgcccggcgcggcgggatcggcgtggcgcgtaggctctcctctcccccgggctcagtcagcgacagccagttatccagctgcgccagctgatcggcaaaggtccctttctcctcttgatgcaggccctgctgcagggcgcgggtggagagcggcaggccgccaggcgccttgccgaccccgagatcgatgcggcccggcgcgagggcggccagcaggttaaagttttccgcgaccttataggggctatagtgctggagcatgacgccgccggacccaagacggatccgccgggtgtggcccagcagccaggcgataaccagctccggcgaggggctcgccagctgatcggtattgtggtgttcggcgacccagaagcggtggtagccccaggcttcggcgtgttgcgccagcgttaatgtacgcgccagcgcctgcgcggcggtttccccggcggcaagcggacttttatccagaatactgattcgataagacatttcgcaggctcatatgaaagtacgtgcctgcattattaaaatctttgctaactattgagaaacaattaattcacatgtgtactgctgaaaattagatatgcccggctgaacgctgcgcttccagctcgcggagcagcgcctcggcctgccgcggattgcgcacccggacgaagcgaatatgacgatattgcggatcctgcataacggccagatagcgtcggcgatgctgccgccaggttttcagcgtccagaggatgatggactcccggctgcagaacgaacggcgaaagctctcgcagttgcccgtgcccggccacagctcctgatgtcgccacgcccggctcgccgcccgccataccgcctggcgcagcgtgcgccagaaaccataatctacccagatcaccaaatccaccgcacgccatttaacgctgcggctgcgattgtaattgccatccagcacccagcccggcgtggccgtcgcggcggcaatggcggcgaaaaatgcctcatccggcgcgccctgccagttcggccgccagtacaagcgatcgagctcgatccagggtaattccagcctgtgcgccaggcgccgggccaaagtggatttgcctgagccgctggtgccgaccacgttgatattcatctctgtttctccccggttaccagactctgcctggcgatactcttggatcatctttcgggctgccgtccccccggtcatgccgcgccagcgaatgtcggttcacctggcgctggcgttttttgggcctattacaatacctgccctgcacagaggaataaatcatccgccataaccattctgctccactgcgtccggccatcaggctggcacaatcctcaggccgggcatacactctgcgtacctgtgagcagtattcatcaatccggaaagattatgctaaaagagaacgtaaacgatctgctctcctttatggtggtggcgcgtgaacgcagctttacccgcgcggcggcccagcttggcgtgtcgcagtcggcgctcagccatgccatgcgccatctcgaaacgcggctcgatgtccggctgttgacccgcaccacccgcagcgtggtgccgaccgaagcgggcgagcgactgattcagcgcctcggtccgcatctggaagagatcgagcaggccctggctgcattgcgagacacccgagaacgcccggcgggcaacctgcgcattaccgccggagagcatgccgccagcgcggtactctggccggcgctaaagccatttatgctgcaatatcctgatattaacatcgaaatcactgttgataatgggctcacggatatcgtgggtgaccgcttcgacgccggggtgcgtctcggcgaacaggtggcaaaagacatgattgccgtgcgcatcgccccggatatgcggatggcggtggtgggttcgccggcctatctgcagcgggccggtacgccgcaaacgccctaggatcttgcccaacatcgctgcatcaatctgcgcctgccgacacgagggggactttacgcctgggaatttgcccgcgatgaccgggagattcaggtgcgggtggagggacagctgatcctcaacagcctgccgcagcgcatcgacgcggcggaggcgggccttgggctggcctacgttccggatgactgcgtggcggaggccttagccagcggccggctggtgcgggtgctggcggagtggacccccgccttccccggctaccatctctattaccccagccggcgccagcataccagcgctttcacgctgttactggaaactctgcgacgctgatctcattgataaatctgtcaaatgctctcggtaaatgttttaggtgcgtaactattaggttacgtgtaggattcagcgccatgtctgagcttatctcctacgtcagaatgatgagaaagccagcataatgtgccagccgtcctccattccggctgcaaacatgggcattgacaggaaactgatacatcaatgaatacgaaacacgaaaatgcagcggagcatcatgctgcaaaacgccactggcttaactcacatgaagcgggttatcacaaagcgatgggcaaccgtcaggtacagatgatcgccatcggcggcgccatcggtaccggtttgttcctcggtgccggggcacgtttacaaatggcagggccagcgctcgccctggtctatctggtctgcggcatcttctccttctttattcttcgcgccctcggcgaactggtcctccaccgcccctcgagcggcagcttcgtctcttatgcaagggagttcctcggtgaaaaagccgcttacgtggccggctggatgtacttcgttaactgggcgatgaccgggattgtcgatatcaccgccgtggcgctgtatatgcactactggggcgcgtttggcgatgtgccgcagtgggtcttcgccctcggcgcgctggctatcgtcggcaccatgaatatgatcggcgtgaagtggttcgccgaaatggagttctggttcgcgctggttaaggtgctggcgatcgtcgcctttctcgtggtcggcaccattttcctcggctccggtaagccgctggacggcaatgccaccggcttccatctgatcaccgataacggcggcttcttcccgcacggcctcctgccggcgctggtgctggtgcagggggtggtcttcgccttcgcctccatcgagctggtggggaccgcggccggagagtgtaaggatccggagacaatggtgccgaaggccatcaacagcgtgatctggcgtatcggtctgttctatgtcggttcggtggtgttgctggtgctgcttctgccgtggaacgcctaccaggccggacagagcccgttcgttaccttcttctcaaagctgggcgtgccatatatcggcagcgtgatgaacatcgtggtgttaaccgcggccctctccagccttaactcgggtctctacagtaccgggcgtattctgcgctcgatgtcgatgggaggctccgcgccgaagtttatgtcgaagatgagccgtcaccacgtcccttacgccgggatcctggcgacgctgggggtatatgtagtcggggttttcctcaactatctggtgccatctcaggtatttgagatcgtactcaacgtcgcctcgctggggatcattgcctcctggggctttatcgtggtgtgtcagatgcgtctgcgcaaagcgatcaaggaagggaaagcggcaaaggtcagcttcagaatgccgggggcgccgttcacctcctggctgacgctgctgttcctgttcagcgtgctggtgctgatggccttcgattatccgaacggtacctacaccataggatcaattccgctgctggcggtattgctggtggctggctggtttggtgtgcgtaaacgcgtgcatgagattcacagcacggcgccgacgctgaggaagtaactggcaggactcccggtttgtccatcgcgggcaaaccgggaggtcagaacttaattatcttcagccagctgcgacacatcgctgctgttaatttcccgcttattacctgactcatcgatatagctggtcatccccgtttctttatccagctgcggcttgccgtgggtaacgatagtttgaccgctcttcgtggtcataacgtagtttgacgaacaacctgccagcagcgccagcatcgcgccggcgcaaatcaccatgaatggctttttcattttatctccactgattaccactgcccgcacgtggcgggaaagggttaagtgtataaccatctggtttgtcaggccaataggcgtttgtaacagagggtgagtcgccgggcctggcccggcggcttgcggagcgcgaccaccgttttccggtttcgtcgcgctgaggtcttacagggcgatacggatcacatcgtccggcgcggtggcttctttctcacggctggaagcctgtttcacgctaacgtacagcgtttttccgtcctcggagagcgccagactgttggggtgagtcggcgttttaaaggtcttcaccaccttgtagctcttgccgtcgataacgctgacttccccggccttacgatgcgtcacataggcttcgttgcgcgccgggttaaacagcaccgccagcgactccggcgcggcgattttctccagcaccttgccgtcgcgggtatcgaccaccagcacttccggctgcttgctgtcggtaataaaggcacgatggccggcggtatcgagactcaggttaagatagaaatgcgctttgccgtcatcctgcaattttttgcgcgacgcaatcgtgttgctctcgctgtcgatggtcagcagttcgccgtcggcgttggtagtatacagacgcttagcttgcggatcgatcgccagacccgtcgccattgccccggtgccggtaatggtcgttttcagcttcagggtcgcgccatctaccacccaaatcacgctctctttgcccagaccggtaatgtagaccgtgttggtctgctcattgaccgccagctcgcgcggctgcagcgggcgcacggtttcgctgcgctgacgctcgtccagcacgaggcgccccttcacggcgccggttttggcgtcaatagcggtgacagtgctgtcgacggtattgccaaaccacagcgtgccggtggcatggttgatagtggcgccgaacggcttcagatcgttgtgaataatctgcgtcacgtcgagggtggtggggtcaagacggtaaaccaccccgcctttgtccagcgaacgactctgtgatgtggcgacccacagcgcattctcctgctggctgtaggccatttcgtaggccccttttccgacggccttgcgcagcatctcttccgcggcgtgggcgctaaagctgcctgccagcagcagagaagtgacgagcagtgaatggcgcagacgcggcgcggcaaaatgacgtaatgacatgacgactccctttgataaaccagtatgtgctgacccgacatcgcttccggcggtaaagtcctggctttacccttatttttgaatgcgaatagtaatcattatttatctcaaagtggagcgctaattgttgttgtgcggtaaattcatgcctggcgagcactatccgttaaccagtagcagttaataattttcaaatattttacaaacgaggtaacatatatacatatgttccatttggttcgtctttgagtattatcgatgaaaatcctgtccgtgcgtcacgccgccctcccggccctgctcttgccgctcattgcggcagcccaggccgcagatgaacaaaccatggtggtgaccgccgcgccaaccatggtttctgaactggatacccccgccgccgtcagcgtggtgaatggggatgagatgcgccaggccgcgccgcgcgtcaatctctctgaatcgctgggcgccgtgccgggcctgcaggtgcagaaccggcaaaactatgcccaggatctgcagctgtcgattcgcggctttggctcgcgctcaacctatggcgtgcgcggactgcgcatctatgtggatggcattccggccaccatgcccgacggccaggggcagacctcaaatattgatatcggcagcgttgacaccattgaggtgctgcgcggccccttctctgccctgtacggtaactcgtccggcggggtgatcaacgtcaccagccagaccggcacccagccgcccaccgtggaagccagcagctactatggcagcttcggcacctggcactacgggatgaaagccactggcgccgttggcgacggcagccacgcaggcgatgtggattacacggtctcaaccaatcgcttcaccacccatggctatcgcgatcacagcggcgcgcgcaaaaatctggcgaacgcccggctgggggtgcgcatcaacgacgtcagtaagctgactctgctgctgaatagcgtggatatcaaagccaatgacgccggtggcctgaccgccgatgaatggcgcgataacccgcgccagtcgccgcgcggcgaccagtataatacccgcaagaatacccgacagacccaggccggcctgcgctatgagcgccagctcagtgcccaggacgatctcagcgttatgatgtacgctggagaacgtgaaaccacgcagttccagtcgatcccccgcgcgccgcagctgaagccgagccatgccggcggggtgatcgaccttacccgtcactaccaggggatcgatacccggctgacccatcgcggagagctgctggtgcccgtcacgctcaccgccggtctcgactacgagaacatgagcgagcggcgcaaagggtatgaaaactttgtgatggtcaacggcgcgccgcagtatggcgaacagggcgcgctgcgccgtaacgaacgcaacctgatgtggaacgtcgacccctacctgcagacccagtggcagctcactgacaaactctcgctcgatgccggggttcgctacagctcggtatggttcgactcgaacgactactacatcaccccaggcaatggcgatgacagcggtgatgccagctatcacaaatggctgcccgcgggctcgctgaaatatgccctgaccgacgcgtggaacgtctatctttccgccggccgcggcttcgagacgccaaccattaacgaactctcctaccgctccgataaccagagcggcctcaacttcggcctgaaaccctccaccaacgacacggtggagatcggcagcaagacgcggatcggcaatgggctgttcaccgccgccctgttccagaccaataccgataatgagattgtggtcgacagcagcagcggcgggcgcaccagttataaaaacgccggcaagacccgccgtcaggggatggagctggggctggatcagcagtttggcgagagctggcgtctgaaggcggcctggacctggctggacgcgacctatcgcactaacgtctgcgacgacgccagctgcaatggcaatcgcattccggggatcgcgcgcaatatgggctacgcctcctttggctatcagccggagcaaggttggtacgccgggagcgatattcgctatatgagcgatatcatggccaatgacgaaaacaccgccaaagcgccctcctggacggtggttggcctgacgaccggctataaatggagctacggcaggatggatatggatctgttcggtcgcatcgacaacctgttcgaccgggagtacgtcgggtctgtcatcgttaacgagtctaacggacgttactacgagcctgccccgggacgtaactacggcatcggcctgaacctcgcctggcgcttcgaataacacgccccttccccgccgatgcctctcgcgatcggcgggcgaagcgcttttccttaccgtctattccaccgccaggcggacacccgccaaccaaccgcgcttgacactccacccccttcgtagtcatatagtaaccacataatcaccatggttactatttatattgatcggcacttttatcagccagggagggataaatggataatgtcgtttatgcggactgcgtattgattaacggcaaggtcgccacggtggacgcacattttagttttaagcgcgccatcgccgtgaagcagggatggattattaacgttggtgaagaccaggagattcagcagcatattggtccccagacgcaggtcattgaccttggcggcaaactcattttacccgccgcgcatgactcacatatccatatcggctggctcgctgacagctggcattgcctgaactgccaggacgtgcgttccctggcagtactgcgggaaagactgcgcgaccaggcagcccgcactcccgccggggcatggattcgtgtctgcggtctggatccaaacgcaatcaaggagtgcgcggccgagcagcgctctctgacgcgctgggatattgacgacgtcacggccgatcatcccaccctgctcgccctgtgggacggtcactcctgcatcgtcaacagccgggcgctggccctctccggtcttgacgccagcccccctgatcccctcggcggacatctggggcgaacggccagtggcgaactggacggcaatttcatcgacctgcccgccctgcatctcgcatccggcacgatgccccgtctgaccgtagcggccctcaaagagaaccttctggcagcccagcgcctgatgaacagcgaagggtatgccagctacacggaaggcgccatgggtccgggggaaaacacgcgcgaggtgggcgctgcgggggatcgcgccatcgccgcctaccgtgaactgcaggatgaaggaaaactcaccgcccgggtatccatcgccttttactccgccgagcggggcgttcagtcctgcgccaccctgaagcgcgatctggatagctttgatttctcccagttcaccgaccgggactggctggactgtcggaccataaaactgttctgcgatggcgttcccacatcgcacacagcgtggatgaatcaggattacgccgaccggccgggatatcgcggacgctcggtgtttggtggccccgaggcgaccgaggaagcacaagttgaggcgctacagcagatgattctgctggctcaccagcgcggttttcaggtggcagtccatgcggtcggcgataaggcggtaaaagtcacgattaacagcttcgtgcaggcgattcagcgctatccgggggagagccgacggcattatgtgctgcacggctcaatgggcgatcggcaagatttcgtgatggcggcaaaatacggcattctgctttccgaacaaccttcactcggcggcccggcatatgactatgaacagcgcgcccgctactgtggcatcaagggggaaatctgcaaagggctacgggatatcatcgaccttggggtcatcatcgccggcgggtcagatggcattatggcgctggtgaactggcgcaaaatggttcaggcagcggtcacccgcaaatcatcttccagcggcaacgttattcgcccggaactggcaattagcgtggcggacggcgtgcggatgtacaccatcaatgcggcctatcaggaagggaaagaagcggtacgcggatcgatagaggtcggcaaagtcgctgattttcaggtgctggaccgcgatatcttcgccgtagcccatgaggagattggcgccagccgcgtggtgatgaccatggttggcggaaacgtcgtctttcaagactaaccgcgctcacccggctcaggtcgccgggcgggcagcgtgctgcatcagcggaaggcgtctgcccgccagagcatcgcgcttccgctacaggagcgaattaaagcagatttcgcagggataactcgaaaatgatcttttctgcctggcaggagaaggcgatggagaggtcgagtttcaccgcgtcgccagcggcgacgatggtgtaatcgacctgcggcggttcactggccggcgctgcggcggcagcacgttcgcgcacggcggctacggtggattccgcttcttcgcggcttgggaacaccttctcggcccggtagacgcagtcctcgttatcaatgatcgtcccgacatcaatggcgcagcctttggtgctgcatttatctactacatctttcatcgtaataacctcttgagttttcttaaggataagaacccgcccgccgaaaagcaaaccattaatatccgtaaggattagcaatttttctattatatcgcgccgcgccgggcgccatcttgcgccaccgcaaaacgaggcatcatgtttacggacggtcgcgtaacgatacgcgttgccctcgcagcaatcgtggtctccatcacactattctgcataccatctcgtctgcctcgactcgcagcgttagtctggtcacagaacatcgccaacaaggagctgctatggcactgccgattatgattgattgcgatccgggacatgatgacgcgatcgccctggtcctcgccctcgcctcgccggagctggaggtgaaagccgtcaccgcttccgcaggcaaccagaccccggagaagaccctgcgcaacgtgctgcgtatgctgacgctgctgaaccggccggacattccggttgccggcggcgcgtggaagccgttgatgcgcgatctgatcatcgccgataacgtgcacggcgagagcggactggatggcccgagcctgcctgagccggcctttgcgccgcagaactgcaccgccgtcgagctgatggccagcgtgctgcgggaaagccaggagccggtgaccctggtggccaccgggccgcagactaacgtggcgttgctgctcgccagccatccggagctgcacgcgaagatcgcccgcatcgtgatcatggggggcgccatggggctgggcaactggcagccggcggcggagtttaatatttacgttgatccgcaggccgcggaaatggtctttcagtcggggatcccggtggtgatggcgggccttgacgtcacccataaggcgcaaatccttcccgccgatatcgagcgattccgccagattggcaacccggtgtcgaccatcgtcgccgagctgctcgacttctttatggcctaccacaaagatgaaaagtggggcttcgacggcgcgccgctgcacgatccctgcaccatcgcctggctcctcaagccggagatctttaccacgatcgaacgctgggttggcgtagaaacggaaggcaaatatacccaggggatgacggtggtcgattactaccatctgaccggcaatcggcccaataccaccctgatgctggatgtggaccgcgaagcctttgtcgatctgctcgcccagcggttagccttctacgcctgacctctatgccaggccccttttccctggcgggaaaggggcctgttaagtcgaagcccgccaggctagtcgtccgccgcgacgcggatcactaccttaccgaagttctcaccttttaacaggccgatcagcgcctgcggcgcctggtccagaccgtcgatcagctgttcgcgatatttaattttcccctcctgcacccagcgccccatctgctgctggaattcggcgatccgatgcccgtaatcctggccgataataaagccctgcatccggatgcgctttttgaggatggtcgccatcagcagcggcagacgatctggcccgtccggcagcccggtggcgttatagccgctcaccagcccgcagacgggtacccgcgctgcggtattcaacagcggcagcaccgcgtcaaaaaccttgccgccgacgttttcataataaacgtcaataccctgcgggcaggcctgggccagctgttcggcaaaatcatccgcacgatggtcaaggcagagatcaaagcctaacgtctcaaccgcatagcggcatttttccgcgccgccagcgatgccgacggtgcggcagcccttaattttgccgatctgtccaaccgtggcgccaaccggcccggtcgccgcggcgaccaccagcgtttcgcccgcctttggctggccgatgtccagcaaacccatgtaggcggtgaagccgggcatccccagaactcccagcgaccaggacgggtgttgcggattgtcacccagcttcaccagtccgctgccgtcggagagttcataatcctgccagccgctgtagcccagcacccagtcgccgggttgataatcggcatgatttgagctgaccacgcgactcacggtccctcccaccatcaccgcgccaatggccaccggcggcgaataggacggcgcgtcgctcatgcgcccgcgcatatacgggtcgagcgataaataaacggtacgcagcagcacttgacccgggcctggcgtcggcacttcgctctcttccaggcggaaattctctgccgtcggttcaccatggggacgggaagccagcacccagcggcgatggcgttgcggttgatctgtcatagcaaactcctcttgtgagcagactgtactgaggctagctgctttatgcgtattatgctttaacattaagagccggatggcgattgattaaggcgaaccaccagatagacgcaggtctctgcggattcattaataaagcgacaatcgttgggcgggccaagctccagacaatcccccgcctgcatctcatggcgggtattgccttcgacaaacaccagctcgccctgttgcagccagattagctggcgggcaagcgcataggacgcggcgggcatcggcacatcgctaccgggcggcagctcaatctgcaccagatcgatcggcaaatcgctgcgcggcgaaacgtggcggcggagatagtggctttgcgggtcgcgccataccggctggctggcaaagcgcagcagcttgccctcctgcatttccgcgcgggcgatcagggtcgacatactgatgccgaaggcgccggaaaggcggcccagcatcgaggcggtcgggctgctttcgccacgctcgattttatggatcatcgcccgcgaggcgccggcccgttcggcgaggtcgttcagcgaccagccgcgggactcgcgctcgatgcggatgcgcgcgctgatgcgctgattgaggttgtcttctatagtattcataacgtaacactatagtgtgcgcccccccattacacaaccatccaccgacgtgttattcccgggttagccgttaaaattatgctgaaaacggatgacagcgtggcgttcattattgtaataatattgtactactatagtgtacgaaaaattgaggtttgctatgtccattcgccctgccattaaagacgactgcgcggcgatcgccgagatctataaccatgccgtcgtccataccgccgccatctggaatgataaaactgtggataccgacaaccgcatcgcctggtttgaagcccgccagctggctggatttccggtactggtgagcgaggaagacggcgtcattaccggttattcctcgtttggcgactggcgggcgtttgacggctttcgccataccgtggagcattcggtgtacgttcatcccgaacatcaggggaaagggctgggccgcaagctgctggtcgccttgatcgccgaagcgcgacggctgaataaacatgtgatggtcgccggcatcgagtcgcagaatcacgcttcgctgcatctgcatgaaacgctgggctttatcaccaccgggcagatgccgcaggtgggcaccaaatttggccgctggctggatctgacctttatgcagctgcagctggatgcgcgtcaggacccggacggcaaagcatgaacgcgtcgctcactctcgcctgcctgatcgccgccggcgttggcctggtggtgcagaacactctgatggtgcgcatcacccagtcggcgtcgacgatccttatcgctatgctgctcaattcgctggtcgggatcgttatcttcgtgacgatgttactgctgcgccagggcgtcgccggctttcaggagctggccctgagcgtgaagtggtggacgctgatccccggcctgctggggtcctttttcgtcttcgccagcatcagcggttatcaaaacgttggcgcggcgacgaccattgcggtactggtggccagccagctggtgggcgggttgatcatggatttagttcgcgcccacggcgtgccggtgcgggcgctgatcggaccgttatgcggggcggtgatgctggtggtgggcgcctggctggtggccagacgccagttctgagcgcatcttcagaggatcgcgccccctttggtcaactgctcgcggcgcgcatcctgctcttcctgatgctgtcgcccatgatgggcgatggcggtgcgcagacgctgctgttggatatagcgttcctcacgactgagttgcgcatcatcactcagggcgattagcagctcattcatatgcgcgataacgccctcggccagggcgtcatcgactttgacgataacctcatccagatgtgccatcctgttctcctttcgcttaattcagcttcgctttggaaaaatcgctccccatcatgctgacggtgtagccgctgacgttgctgcgcgtcgcatagaaggttttcccggtcgccagggtgatccatggcgcctgctgataaaaaatctcctgcgcctgttcgtagagtttggcccgcgcctgcggatcgctcaccaacagcgctttctttaccagcgcgtcataggatttatcacaccagcgggcggcgttggagccggtctggatattatcacagctgagcaatgtgccagcaaagttgtccggatcgccgttgtccgacatccagccatacagggcgctgtcgtgctcccctttacgcataccggcaaggtattcgccccattcatagctgacaattttggctttcacccccactttcgcccagtcgttttggatcatttcggcaatgcgttttgagtttgggttgtaggggcgctggaccggcattgaccacagggtcacttccgcgccttgctccagacccgcctgcttgagcagcgctttggctttctgcggatcgtaatcgtagtccgggagatctttcttatacccgagcatcgtcgacgggatcggtgatttcgccacgctgccggaatcgaggaataccgccttgacgatcgcctgcttgtcggtagcgtagtttaacgcctggcgcaccagcacattatcaaacggttttttctcggtgttaaacgccagatagccgacgttcagcgcctcaaccgcatgcagcgccagatctttattgcccttaatcaccgggaactgtaccggcgacggcgcgggaataatctggcactcgttggtctgcagtttcgccagacgagtctcgacgttcggcgtaatggagaagattaagtgcttggtcggtacctcgccttcccagtagtggggattggcaatatagcggatttgcgaatccactttatactgctgcagcgcatacggcccggtaccgacaggccagttatcaacgttttccggcgttcctttcttcagcatcgcctcaccatactctgccgacagaatagaggcgaagtccatgccccagtcggcaagaaacgccgcgttcggctcgttgagctcgaactgcacatggtaatcatccacctttttcaccgatttaatcagcttatcgaggcccacgtcgtggaagtattcatagttcccctgcgacaccttatgataaggatgctgaggatccatctggcgcagcacggagaacaggacgtcgtcggcgttaaaatcgcgggtcggtttgaagaatttgttgctgttgaacttcaccccctgacgcagagtaaaggtccaggttttgccatcctcagagacgtgccactcggtggccagcgacgggatcggcgtatttttcaccgggtcaaagctcaccagacggttatacagtacctgcgagctggcgacgaacgacggaccggagctggcgatctgcggattgaaggactccggagaggcttctgagcagtagaccagagtgtcattgcctgcggcccaggcggcgccggccggcagcagtgcgctcagcagcagcgccagcgtggttttccctgtagacatggttataagtcctgattattgattataagaacggtaataacagcacagccgcctgacggcggcaaataatcaatggctatcaccttatgcaaaacgcgtggaatttgctggtttaatcgacgttgcgctgttttttacgccagagggcttcgggatgttgtgagccacacaaaattcctgcaaaaaaatgtgcgataaccgcccggctcacgcttcccgtcagtgccgcccggtacactgggggaaccgcagaacaagaggtttccaccatgacaatcacctgcaatctgtacattaacggccagtggcacgatgccgaaggccgccgcacctttacccgacgccacccggcccacgatgaggcagcctcggtggccgctgccgccagcctcgccgacggcaaacgctgcgtcgaagccgcggcctgcgcctttccgctgtggcgcgatactgcgccggcggaacgacgtcgcttactgctcgaggcggcggaacagatgctgttgcgggaggcgaaatttatcgccgccatggcggcggagaccggcgcgaccgcgcactgggccggatttaacgttcatctggcggcagatattctgcgtgaagcggcggcgctgaccacccagattgaagggcaaataattccgtccaacgtgccgggtaacctggcgatgggcgtccgccagggggcgggagtggtgctgggcatggcgccgtggaacgcgccgctgattctggccacccgggccctggcgacgccgctggcctgtggcaacacggtgatccttaagggcgccgaactttcccccgccactcagggactgattatcgacgcccttgacgcggcgggcttcccgccgggcgtggtgaactatcttacctgtgcgcctgaagatgcgccggcgctggtggaatcgctgatcgcccacccggcggtgcggcgcgttaactttaccggctccacaccggtggggcgcattatcgcccgcacctgcggacagtatctgaaaccagcggtgctcgagctcggtggaaaagcgcccctgctggtgctggacgatgctgatattgagcaagcggcagcgggcgctgtttttggcgccttcgccaacgccgggcagatctgcatgtccaccgagcgcattattgtcgacaatgccgtagcggaggcgtttatcccgctgctggccaggcgcgccgccgccctgcctgccgccctcactggcccggttgtcgatatgaacaccatcgcccgctgcaacgcgctcattgacgatgcgttagcgaaaggcgctcgcctgctgaccggtggtaaagccaacgatacccatatgagcccgaccctgctggacggcgtgacccgcgagatgcggctgtggcgtgaagagtccttcggtccggtgaaagcgattattcgcgttcatagcgaagaggaggcgctggcggtggccaacgacagtgagtacggtctttccgctgcggtctacagccgcgacagcgccagagcgtggaacgtagcgcaacgtctgcataccgggatttgccatatcaatggcccaacggtgcatgatgaggcgcaaatgccgtttggcggctgcaaagcctccggctatggccgctttggcgggcgggccgggatcgcggaattcaccgagctgcgctggataacgatccagacccaaccccgcgagcttcccttctgaggcccagcgcctcttaactatggctggcgataagctgcgccagcccctgcgggttttcccacgccatcgagtgtccggcatggggcacgatgccgaccgggatcccttgtgcctgaacgaggtcgctatccgcgtaagggagcgaccgctctccgacgatcagcattttctggcagcgcagctggcatagctgggtaaaccagggcgtgtcgctgccgcgtatcaggctgctggcggcccgccagacggcccagggggcgctgttttgtaaacaacccgcccacggcgagcgctcctccgccagcagcctggcatagccgtcagcgacaaaggctgactctgactgagccgcaatgcgcctgctgtactcgccgccgccggcgaacagattgggttccgagaccagcagcgtggtcacccgctcgcccagtagccccgccgcttcgatggcgatgctccctcccatgctatgcccgaacagcgcgaagcgctgcaggcgcaggtggctgaggaactgctccaaaactaaagcctgctcatgtatgttgtaactaaacacgcgcggtttatcgctatagccgaagcccggcagatcgatgagtattttgcgccgttctcggagcgcgggatcgctggcaatgcggggataatcgtaggatgacgcgcagccaaggccgtggataaacaccaccggaaggccatctcccgggaaatcgtgccagcgcagcgtggcgccagcgacggacgaataaaaaccgttcacctgtatgcctccatgataaggttactggttttttatacagtaacctcaccctttgtgctacccttttctgccgtctagcgcctgagggttaaaacagcgagacgagcagcgccatcgggaagctgaacggccaggtggcgccgatcagcagggccgccagcaggcggatcatccggctctctttggttaaaaaccagctaatcacggcgcatatcacgcccataatggcgtaaaacaccaacattttttgatataacgtcattcttactttttccttccctgagggcgttccatggtgggatgattatctgccatgacgtcgtgattcagagatacctgtataacaaaatcagaaacgggctgaatattcagaataaagcctgattcgtcttaatctgatagcgcaaccgctggcgccgtactatacctttaggacttactcattagggtggcgctatggatgtctccagtaaaaccgtcgttatgattaatgtctgcgccgcgttcgcgcttatcagcctgctgtccgtaagatttggctggttttaatcatttaattcagcaacgaaacctaaaaaagcagccctggaggctgcttttttacgcgcgaacaacagagttgttatcttgctgtcgggcggcgggggctaactgcgcggcagctattaccttattaagactggggttatagcgcggcagtacattgactttttcactatcccattcggcggcggcgcagacggcctgccctacgcccatcttctcacagctttggattcgtttcgccggggcattaccatagctcagcgccacagcgccgatagccagcagaataaaagcaaaaattttcacagcgacatcaacgtcaaaacctaatatgccctaaatgatcgcatgagcggcggcggaaagtcaaacccggggcgcgctaccgggcggcatccggtatttgcctctgcctcagggctataaaatattcagaacaaatatcatgcgataaccgtaaatattaaaagcttatctctagccgtgaaatactttctgttcaggggagttaatttcgctaataaggaaaatatttcgccgtcggcaaggggaaaaggatcgccgccttcgccacaggcgcaatatatcgcgcgggccgtcatcgtaagaagataaatggcgatggcaagccgttgtaacataacctcttcatctccgtcatcacggataagagtcagaaatagcgctaaatgacaacaaatatcatttgccttcgcgtcagataatacttacattcataaccattggtaatgctttagcgcagttcgcgctgtgaatttcgaggtggatatgtccggaatcatcacgctggtcatcgcgctaatcctgctggtcgcggcggtgtataatcttatttcctacattcgtgaccggcgcagcgccagcctgcccagcaaaaaaactaagcgctgaaagtagttaaagcggtattctcgttatcccggcgcgactggccggctcatctcttcgctcttctgcgagcacaaaaaagcccctgccgacagacaggggccgcaattcggtcgcgaaccgcgatgttgccgccccacccgccgggcgctgtgcgcccagggtgactggcggaccccatccggcgcttatctccggcactcatgatggcttagctcttgaaggggcatcagaataatctcatatcccctgggttgagttttgacaatttttgccattgtgactattagcggcctaacacacccatcgcgcaatagtcgcctggcgctaaatggtcaatcatttagctatgcttaaccatcacatggcggaccacggtataatcctcaaggccatatatcgacatgtccttgccgtagcctgacagcttctggccaccgtgcggcatttcgctgaccagcataaagtgggtattgacccaggtgcagccgtactgcagcctggcgctaagacgatgggcgcgaccgacatctttcgtccataccgaggaggccagaccatactgagagtcattcgcccagctcagggcctgcgcttcatcgctgaaaggcgtcacgctgactaccggaccaaacacttcgcgctggacaatagcgtcttcctgccgggcgccggcgagcagcgtcggctggaagtaatagcccgcgccgtcagcccgactgccgccggtgaccactttaatttgcggcagcgcccttgcggcttccaccgccgcgctaacgcgctcaagatgggccagcgagctcagcggacccagttcggtggcagcgtcctccggcgcccccattttcaggctggccaccgccgccccaagtttctccaccagctggtcatagataccctgctgggcgtagatccggcaggcggccgtgcagtcctggccggcgttgtaaaaaccgaaggtccgcaccccatccaccaccgcatcgatgtccgcatcgtcaaaaacgatcactggcgccttaccgcccagctccatgtgggtgcgtttaatcgacgaggcggtatggccaatgatatgggctccggtggcaatcgatccggtcagggagaccattcgcactttaacgtgggcggtcaaggggtcgcccaccgttttaccgcggccaaacagcacgttgataaccccctccgggaagatatcttttgccagctccgccagcttcagcgccgtcagcggggtgatctccgagggttttatcactacgcagttgcccgccgccagcgccggggccagcttccaggccgccatcatcagcggatagttccacggcgcgatggaggccaccacgcccaccggatcgcggcggatcattgaggtatgcccttcgagatactctccggccgccatccccggcaggcagcgagcggcgccggcgaagaagcggaagacgtcgacgatggccggcatttcatcattaatcacgcagtgcagcggcttgccgcagttcagcgactccagctgcgccagggtttcagcctgcgccgagatggcgtccgccagcttcaggagacattccgcacgcgtcttcggcgtcgtctgactccaggcatcgaatgcccggtccgccgcctcaacggcggcatcgacctgggccgctgtcgcttcggcaatctccaggatcacttcgccggttgcagggttatataccggaaccttctcgccttcacctgccactaacttaccgtttatcaataggttgtgttgcatagcattatcctgtttcatggttttatttcccgtttccggcgtcgttatcgccgtcgcgggtgagccaccaggcccctaagattggtatcgtcgttaccagcatcaccaacagcgcgacaacgttggtgacgggcacatctcgcggccgccccagctgattcagcaaccacagcggcaaggtgcgttcatgccccgcagtaaaagtggtaacgataatttcatcaaacgacagagcgaatgccagcattccccccgccagcagcgccgaccccagattgggcagcactacgtaacgaaaggtctgccaaccggtagcgcctaaatccatcgaggcttccaccatactccacgaagtccggcggaagcgggcgatgacgttgttaaacaccaccaccacgcagaaggtcgcgtgccccaccacgatcgtcagcaggccaggctcaaggccgaccgctttgaacgccgtcaggagcgccaggccggtaatgatccccggcagggcgataggcagcagcagcagtagcgacaccgcatttttgccaaaaaaggcgctgcgccacagggctcctgcagccagcgtgccaagcactaaggcaatggcggtcgacagggcagcgatcttaagtgacagtgtcactgcctgcagaatgtcgctgcgcccggccgcctcgctgaaccagcgcagcgtcagcccctgcggcggaaagctaaaggctgcatcttccgtattaaaagcatagatggcgataatcagcagcggaaagtggaggaatatcaccccgccccaggtcgccagtcgcagataccagggcgcgcgttcagagtgcatcgaaggctcccagacgtttcacgaacgccagatagagggcaatcaagacgataggcaccagggtaaacgccgccgccatcggcatattgccgatcgccccctgctgcgagtaaaccatattgccgataaagtatcccggcgggcccaccagctgcggcacgataaagtcgcctagcgtcagcgaaaaggtgaagatcgacccagcggcgatgccgggaatggccagcggcagcaccacgtagcgaaaggtctgccgcggggccgcgccgagatcggccgaggcctgtagcaacgatcccggaatacgctccagcgccgcctgcaccggcaggatcataaacggcagccagatgtagacgaacaccagaaagcgtccaaggccggaggtggacaaggtattgccgccgaccgccgggacgctcaacagcgcgttcagcgccccctccagtccaagatgaccgaggaaccactgcgccacgccatctttcgccagcagcagcacccacgcataggctttgacgatatagctggcccacattggtagcatgaccgcgatataaaagaaggccttcattttgccgctggtgtagcgcgccatataccaggccatcggcagcgccagcagcgcgctggccagcgtgacgcacagcgccatcaccagggtccgcacaataatgtcgtagttggcagggttgaacagcgcccgcaggttagccagcgtgaagtcgctggtcaccgacatggtgaagtcgtcaaaggtataaatgctctgccacagcagggtcagcagcgatcccagatagacgatgccaaaccacatcagcggcccgagcagcagtaaaaacaggcccagcgccggtcggcgccagaagatccccgatatgcgcccggtctgcgcaggaattattgccatggtcatctcagcctccgctttccagcggggtcatcgccgagcgcgaccatgacgcctgtactatttgcccggttcgcggaacgctggccgccgccgcgccatcgatgttggcctggctgaccagcagtttgtcgccatccgcgaggcggagctcgatccgcgtcgccgccccctgatactgcaccgcctgcaccacaccctgcacctgcacctcgccgccgccctgcaggcgaacatgctccggacgcagcgaccagctgcccgccatcccgcacaatcgtcgggcctcctcggctgcaaaaacgttggcggtgccgacaaaaccggccacaaatgcggtcctggggtgcagatagagatcctgcggggcatccacctgctcaatgcgcccgttgttaaacaccgccacgcgatccgacatcgacagcgcttcgctctggtcgtgggtcacgaagatgaaggtgatccccagcgactgctgcagctttttcagctccacctgcatctgctcgcgtagtttcaaatccagggcgcccagcggctcatcgagcagcagcacccgcggctggttcaccagcgcccgggcaatcgcgacccgctgccgctggccgccggagagctgggagggcttgcgatgatgagcaaagccaagggccaccttctccagcgcctcctgggcgcgggcatggcgcgctttcttcgccatgcctttgaccatcaggccgtaagcgacgttgtcaaggatcgacatgtggggaaatagcgcgtagtcctggaacacggtattcacatcccgctgccagggcggcagttcgctggccggctgaccaaagatatggatggttccgccggagagctgctcaaaaccggcaatcagccgcaggcaggtggttttacccgagccggacggacccagcatcgagaaaaattctccatcgcgtatgccaatgctaaccccatccaccgcccgcacatcgccatacaggcgcgatacattctggaactcgaccgcgtacgtcattgtttgcctccgatccttagcggccgcccattatcgcaatatagtcctgagtccagcggctatagggcacgtatttcccgccttccgcaaccggcgttttccagaagtgaatgcggttaaactgctcatagccgttggtctcacagcctttatcaccgagcagcgcgctggctttacagccctcaggcaccaccggcagcgaaccgaaccaggccgccacatcgccctgcaccttcggcgtgagcgaccagttcatccatttataggcgcagaccgggtgcttcgcctcgctgtgcagcatggtggtatccgcccagccggttaccccctccttcgggaacacggtggcgaccggctggccttccgccttcaggccgttggcttgatagggccacgaactggaggcggctaccccttcgtttttgaagtcgttcatctgtacggtggcgtcatgccagtagcgatggatcagcggttgctggtcgcgcaggactttcagcaccgcgttgtactgggtttcggtcagttgataggggtcttcgatccccagctgcggctgggtggctttgacaaacagcgcggcgtcggcgatatagatcgggccatcataggcctgcacccgcccctggttggttttaccatccggtagatcctgcttgacgaacaccacgcgccagctgtccggcggcgtcgggaatacgcgggtgttgtacatcagcaggttcggcccccactgatacggcgtgccatagactttaccgccgacgttaaaccacgcccccttcgcaatacgcggatcaagggagccccagccggcaatcagcgccgtgttgatcggctgcacgcgtttgcccatgatcaggcgcagcgaagcatcacccgaggcggtgaccagatcgtaaccgcctttggccatcagactgaccatctcgtcagaggtggcagcggttttgacattaacctggcaaccggtgtccttttcgaactgactcacccagtcgtactgtttgtcggtctgaccgcgttcgatatatcccggccaggcaataatatcgagccgcccttccggtttatccagcgaggtgagcggctctgccgcctgaacggtcaaacaagccatacccagcacataaaggctgcaacgggcaatttttttgctcatcaggtgttactcctgtcacaaaggaattagcggcagccgtgccgtaaaaatatctcctgaaataagggtagtcagcggattaacgcccccaggggaatttattcaggttgtgacccgggacgcattacgtaaaaatcgccaacacaagcaggactttatggattatagacaacgagttagggaatgaggaggggtatgcatatttcctatggtgagcgccggtaaaataatgaccggcctcgataaaaatcctctttcgcttattttcgcagaatgtttatcatgagaaaaataaacgacagggtcaggcaagctgttcgcgaataagttcccccaggcgcttcaccccctgctcttcgcgttccccccagccccaggcggtattaaaacggaaaaacgaggtccagctgtcggaggtggagaacattttccctggggcaatactgatgtgcgacgccagcgcccgggcgctaagtgcgctagcgtcggccccttccggtagttcgatccacagaaagtagccgctgtcgctgtggtggacgatgacctccggcggcagatggcgcagcagcgcctgccaggcctgctgtttacgctccgccagctgacgacgtagacggcgcaggtgggcgtcatagcgcttggtggacaggtaatccaccagggctaactgcatcggcgaactggtggaaagcgtactcatcagctgaagctgctggatccgccgcgcctgtttgccggccgccacccagccgatacgaaagccgggtaccagacattttgagaacgagctgcagtgcagcgtcatctcctggcgatcccagaacttcgccggtaacggcttttcgcggccaaaatagagctcgctgtagacatcatcttcgatcaacatcacgttatagcgcgccagcagcgccaccagcgccgcttttttttcagcgctgagggtgaagccgagcggattctggccgttggtcatcagccagcaggccttcaccggatagttttgcagggccgcctccagcgccgtcagatcaatgccttccctgacgtcagtggccaccgacaatgctttcaaacgcagcctctccagcgcctgcagggcgccgtagaagcaggggttttccaccaccacccagtctcccggctcggtcaccgcctgcaggctgaggttaagcgcctccagcgccccggcggtgatgacgatctcgtccggcgagacgttcatcccctgcagggcatagcgacgggcaatggcatgccgaagttctgcattgcccggcggcagattctcaatgacgctcatggcggtggcggttttactcacctgcgccagcgagcggttgagctgctgcagcgggaagagacgcgggtccggaaaggccgaggcaaagggcagcatcgacgcctggcggctggcctggagcacctcaaagatataggtattgatatcgacggcttcatcgcgagtgacctgggcaggcggcgccggctggcggagcttcaccggctggggggcaacataataacccgactgcggacgggcgacgatgcgcccctggctttccagcagctgataggcatggctgacggtcataaagctcatgccgctgctgatcacctgctcgcgcagcgacggcagccgatcgccaggcaaccagacgccaagggcgatctgctcggtcagttgctgcgccaactgttgatactttttcattgcggccgtccccgtacgataacgtcccattatcatatatcagttataaaaaaatcatagtttcctgtaactgttatatctgcagcggcggccgcgtcgccgtgatagcacgggatgggtttaaaatatcaccacccagaatagcgagattaaaacaaaccagaagataatcattacgccaagcgtaatgcacagactctgtaatcctttttcagacattggcattcccttttatttattcccgagctcatacagtacaaattagccgcggagccgacaatttattattatttaatttacgattaaccggctcagcgtttttacttattctcatactaatgagtgataataaatcagagtaaaaatccgtggcggatttcgtaagccaaaatatgagctacggcgggtggtaaggatatattatgccgaccaggtgactacgccataccggcggcagggccgcgtagccagccgttagcaataatatgacagacagcggaatagcgcctaatcaccttccgcagggattaatcaaggttgcgcaaggatattttctcgccctggcaacagctgaaaaatcataacagcggccaactgttatgataaaaaatggcgtgactgcctctgcccctcagtcgtcaccccacctaaaattgcgctgaatcaattttgttgtggagtcctgcatgttcggtcttgatgcattccatctggcgcgagttcaattcgcttttacggtctcatttcatattatcttccccgccattactattgggctggccagctatctggcggtgctcgaaggcttatggctaaaaacaaaaaatcccgtctggcgctcgctgtaccatttctggtcgaagattttcgccgtcaacttcggtatgggggtcgtttccgggctggtgatggcctaccagttcggcaccaactggagcggtttctcacagtttgcaggcagcataaccggccctctgctgacctatgaagtcctgacggcattttttctggaagcgggcttcctcggggtgatgcttttcggctggaaccgcgtggggccggggctgcactttttcgccacctgcatggtggcgctgggtactatcatctccaccttctggatcctcgcctctaacagctggatgcagaccccgcaggggtttgagatcgttgatggccaggtcgtgcccgtcgactggctggcggtgatctttaatccgtcgttcccctaccgattattgcatatgacagtagcggcgtttctcagtagcgcgctgtttgtcggcgcctcggcggcctggcatctgctgcgcggcaatcagtcgccggcgatccgtaagatgttctcgatggcgctatggatgacgctgctggtcgcccccgtccaggcgctgatcggcgatatgcatggcctgaataccctgaagcaccagccggcgaaaatcgccgccattgaggggcactgggaaaatccaccgggtgagccaacgccgttgctgctgtttggctggcccgatatggaccaggagcgcacccgctacgggcttgagatcccggccctgggcagtctgatcctcacccacagtcttgataaacaggtgccggcgttgaaagagttcgctcctgaggagcgcccgaattctactgtggtgttctggtcatttcgcctgatggccgggctaggcatgttgatgctgctgctgggcgtgctggccctgtggctgcgtcgcggcgaccggctataccactcgcggccgtttctgcgttttgccctgtggatggggccatccggcctgatcgctattctcgccggctgggtgaccaccgaggtgggccgccaaccctgggtggtgtatggcgttcagcgcaccgccgatgccgtttccgctcatggcgatctgcatatgtcggtcagtttattgacctttatcgtagtgtacagcgccgtcttcggcgtcggctacagctatatgctgcgcctgatccgcaaggggccgcaggagatgctcccggcgacaaccggtacgccagcccgcccgctgtccgccgccactgaaggttatctgcagaaggagtcccgctaatgggtatcgagttatcggtgatctggttcgtgattatcgtctttgccacgctgatgtacatcgtcatggatggctttgatctgggcatcggcctgctgtttagcacggtgcggggcggcggggatcgcgacgtaatggtcaacagcgtcgcgccggtatgggatggcaatgaaacctggctggtgctcggcggcgccggcctgtttggcgcctttcccctcgcctacgcggtgatcatcgacgccctgtcgatccccctgaccctgatgctgatcggcctgatttttcgcggcgtcgcctttgagtttcgcttccaggctacgccgtcgcaccggccattctgggatcgcgccttttttggcggctccctgctggcaactttcagccagggcgtggtggtcgggtcggtgatcaacggtttcaccgtcagcggtcgcgccttcagtggcggcatgtttgactggctgaccccgttcagcctgttctgcggactcggactgtgcgtggcctatgcgctgctcggcgccacctggctggtgatgaaaagtgaaggcgcgctgcagcagagaatgcgcagcgcatcgcggcagttgctgggtgccctgctggcggtgtttgccgtcatcagcctgtggactccgctggcgcacccggcgattgctgcccgctggttcagcctgccgaatctctatttcctgctgccggtaccgctgctggtgatcctcgttagcggctggctgtggcgcacgctgcatcagcgcgaccgccatgtttcgcccttcacgctgacgctgggcctggtctttctcggcttcagcggactggggatcagcatctggccgcatattatcccgccggccatcacgctgtggcaggctgccgctcccccgcaaagccagggctttatgctggtgggcgccctgctgattattccggtcattcttggctacacctgctggagctattacgtgttccgcggcaaagttcagcctggggagggatatcactgatgcgtactgcctggcctaaacgtctgctgtggctgatcgcgctctggggaggcagcgtactgacgctggccgccataagcctgctgtttcgcctgctgatgaccgccgcagggctaaaagtctgagtgggatgcagagaagtccgaaaagggacttctccatcttatcttcacttttgcctgctgaaatacggtgatacatctgaagaaaggatattgctatgaagaagttagctttactctccgccataatgacgctgggaatgtcgtcatgggcttttgctgccgacaacccgccgccgccggaaaaaggcgcgcagcatcagggtaaaccgccggtgaaaaacggccaacacgatggtaagcaagcgcaatacaacagcaaaaagccacaacgagacggcaaacagacgcagcatgatggcaagcagccgcagcacgatggcaagcagccgcagcacgatggcaaacaaccgcagcacaacggcaagcagccgccaaaagggagcgagcacagcgggaaaccgctgccgccgaaagcgtaacactctggcctggcttccgcgtcaggccttttttcatccttcgtcagccatcgttgacaaactcttgccgttctttgagatgcccgaaaaaaagcctgcattgcgcctgacatagtatgtccacgccattgttccgtcgagaaaaggtatgttaaagagaagcataagcgccctgctgttgctgtgcgcattattttccgggcatctgttggcccatcgtcagggacacgagtactttccggtgcaaagtctcgaacagcagctgctgcacgaagcggatagcgatgagcttcgcagccagcacgaggaggccgccgcagacctgcgcgaacatcaccgctggcaggacgaccgtaaaccgcgggcatcctgccaatagcatcgactcgaatcaggcccctttgcgcttcggcagcgtcttcatcagatcgtccgggctgacggaggccacaatgctgcccgggtgcggcattttgaggatatggtttttgatcttgccgaccacgtgcatttcgcacggacggcagtcaaacttcagggtcaggacctcatcgccatggatcagctgcatcggcgtggctttccagctcttgatggagcctttcgcctgcttcgggcagaggttgaaggcgaaccgcaaacaatgcttagtgatcatcaccggcacatcgcccttctcttcgtgcgcttcataggcggcgtcgatcagctgtacgccatagcgctggtagaacgcccgcgccttgtggttatagacgttggcgaggaaggagagatgggtctccgggtagaccggcggcggtacggagaccggcttgcgggtgccgcgctgccaggcgttgaggcgcgcttcatccagcatctccgcagtttcccgacgcagctggttgagcaggctgttgggcacaaacagcggcggcagattaacctgcacctcgcgcgcatagtagatggtttgccccagttttgtgacaccgtcacgcaggttggccagcgctttctccgcctggttagcttcggcgaactccccgtcaagggtgtgggtcacgctgacgccatcttcacaggtcatggtgagaaccagctgctcctgccagccgctcaacgtcacatctaccgcgatgcggcgttcgctggaggtctttagcagcgcctgttgccagttatgatcgaggttgcggttgagcggctgatgggggcgcactttatgcagatccgctggcatctcgttcggccatacccgataacggttttcgccggttttttccacggtattagcacggaagcccaccacttcgcgcttaatcatcacgttgagaccatcgccgttggttaacggttcactgacttcaacgtcgagatggtctttgcctaccttcagaacttcacccaccggcaggccgataaatttcggcgaatcaaaggcgccgatatcgcctttgcgggcattaacaaagtagtcagtgctgccgcggtggaaggttttatccgtggacgggataaagaaatgctcggtgcgtccagccgaggcgcgcgccaggtcgccgcgatcttcgataatggcatccagcatttgacggtagtgcgcagtgatgtttttcacataactcatgtctttgtaacggccttcaattttgaaggagcgtacgccagcgtcgatcagcgccgccaggttggcggtctgatcgttatccttcatcgacaggagatgtttctcataggccaccacccgcccctgatcgtccttcagggtatacggcaagcggcaagcctgcgagcagtcgccgcggttggcgctgcgtccggtctgggcgtgcgaaatgtaacactgcccggaataggccacgcacagcgcgccatggataaagaattcgatagtggcgtcagtgtggtcgtaaatggctttgatttgactgaggttcagttcgcgcgccagcacgatctgactgaagccggcgtcggagagaaacttcgctttttccacactgcgaatatcgcactgggtgctggcgtgcagctcaatcggcggcagatccagctccatgatccccatatcctggacgatcagcgcatcgacgcctgcgtcgtagagatcggtaatcagccgctgcgccggctccagttcatcgtcatgcagaatggtgttcagcgtcacaaatacctttgcgccaaagcgatgagcgaaaggcaccagcccggcgatatcgctcagactgttgctggcgttgtggcgggcaccaaagccaggtccaccgatgtaaacggcatcggcgccgtgaagaatcgcttcgcgagcgataccggcgtcgcgggcaggactaagaagttcaagacgatgattgtgcaggcgcatacgcgtgttgttatccagtataagggggtcgaaatggcggctattgtagtcagaaccgggcgcagacgaaaaccttttccgccgtcgcgcgacgacgaattttcacttttcaacaaagtattgacggaaaagatatttccctcaaatcacggcgaagagtactgtcatcacgtattccggattttcctcgtcacgttgtgagtggttatcatcagtcatcttgtctggccgcgggttcgctcgcggttttttcttttggataatggataagagaatggaaatgggccgcctgggcgccgcggttacgatacgcatgcgtcgcgtcgccggcgaaacgcctaccctcacccgcctgcagcgagtgccactccccttgtaagcacaaatccagcgtaccacttatcactaccacatgctcaatcacccctttctcatgcggcgttgattcgctcagcgcgccgggggcaagggttatcgaaaaatggtcaaagcgcagctcgggatcccacgggaatactggcgtcaccaccatcgcctgctgctgcggatcaaacgcggagggcgcggcgctggcgtccgggacgatgaacgccgaaaacggtacgttcagcccggtggcaatcttccacagcgtcgccaccgttggacttgattcattccgctcaatctgcccgagcatggctttcgacaccccggtctcttccgccagtcgcgacaggctccagcctcgctgctggcgcagggttttaagcgttgccgccagatgttgcgcaatattcatccttcctcctgtttttactgcgcaaagtataccgccatttgtctgattttttcaggacgtttaacggcatcgtacgccactggcggcgagtttttctcccagggtagctgcgcgaaccaccgcttgtgcgttataacgcacaatgatacagtgaatggatgttataacgcacatgagaatcatcgatgcgctcgtttagtcttccgcttcccactctgttcgctggcttcgtcgccgtgttggtggggtacgccagctccgccgccatcatctggcaggccgccgccgcggccggcgctacccccgggcagatcgccggctggatgacggctcttggcctcgccatgggcatcagtactctcgcgctgagcgcctggcggaaagttcctgtgctcaccgcctggtcaacgccgggcgctgcgctgttagttagcggcctgcagggggtgaccctcgccgaggccgtggggatctttattttcgccaacgcgctgatcgttatctgcggcgccaccggcctgtttgcccggctgatgaagatcattccccattcgctggccgccgcgatgctggctgggatcctgctacggtttggtttgcaggccttcgccggcttacaggatcatctgccgctgtgcggcgggatgctcgccgcctggctgctgtgtaaagcgctgtggccccgcttcgccgtggtggccgcgctggtgattggagcgctgattgcggcggcgtccggggatgtggctagcgccgccgtgccgctggcatttgtgacgccggaatgggtcgtcccgcagtttactccggcgcttttgctcagcgtcggtctgccgttcttcctcgtcaccatggcctcgcagaacgctccagggttcgccaccctgcaggcatcaggctataccgtaccggtctccgcactgatcgtcgtttgcgggggttggcactactgctggcgccgtttggggtttattccatctgcatcgcggcgatcaccgccgccatatgccagagcccggaggcgcacccggatccgaaccagcgctggctggcggccatagccgcgggcggtttttatctgctggccggtctgttcggcgggtcaatcaccgccctgatgtcggccctgccgccggcgtggatccagatgctggcgggtctggcgctgctcggcaccatcggcgggagtctgtttcaggcagtgcatcaggccagtgagcgcgatgcggcagtgctaaccttcctggtcaccgccagcggggtgacgctggcgggaattggctcagccttctggggcgtggtgctcggcggggtgagttacggcgtgctatccgcgctgcgccgcccgtagctgggagggcgtcaggccggtggcggctttgacccgatggctgaaatggctgggggagctaaaaccacaggccagcgctatctcggttaacggcagcgcgctatggcagatcaggttttgcgccttcgccattcgctgctgcatgacgtactgatgcggagccatatttagcgactgacgaaacatacgagcaaaatgaaactcactcagacccgcctgctgcgccaggtcggccagggtcaagggctgatcgagatgagcatcgatccaggccagtacgtgacgctttacgcctggcgccagcccgccggtgaccgtcggcaaacgccactgcacggtggaatagtgctggatcagatgggtaagcagtaagctgctggcggcgctgagggtcagctggttcgccggctgccgccagtcgttagccagcaaaaactgacgatacactgcggtgattttatcatcgctggcgaaggtcttttcctgcagggtgaagttcgccgggctgcggtcccacacctcctcgccgacgcgacgcaggtgcgcatcggtacagtaaagatgcacaaacgacagatcgccgcggatatcccatacgctttcatcgcctttcggcatcagacaaaaacgatccgggccgccgccatttttccagccgtgcggcgtcttttgatagctttcgtagccatcagcgacgtacagacttaaagtatgatggtcgctgcgcaccgtcacggtatcgcaattgttataccaggcggccagttgaataccggaattcagctccacggttcccttcagcaccgcgttctgtcgccgtaatgtttcaaatgtcccgtaacccatcgtcttcacacattgtctgtaaaagccctagtctagggagactacggcgcggtttccagtcctcaccgccagcggagggcaaataagcgcaagaatttgcaagccgacaacaaaccggtgaaagccgcagcaggcggcagccggcatactcctcccatcaacaggtagaggagaaccagggtgaacgcattactctatgcactcgttgtcgtgatctggggtacaacgtggattgcgatttttttacaacagggaccggtggccgcgccggtatcgattttctggcgtttcgccgtagccagcgtcacgatgctggcgattctgctcgtcacacgacgcctgcggccgctgggcgcgaaagatcatctctgctgcctgctgcagggctgctgcgtcttctgctttaatttctggtgtttttataccgccgccgcctggatcaataccggtctggaatcggtgatcttttcgatggcggtactgtttaacgccatcaacagctttctctttttccgccagcagccgccgggccgcttctgggccgccgccgcgctgggtctcgccggtatcgtcatcctgttctgggacgacctgctggccaacggactgaacgcctcgctgctgtgggggatcgggctgagcgccctgggtacctacggtttttcgctcggcaatatgttcagtattcgccaccagcgccgcgggctggaaacgctgaccaccaacagctgggcgatgctctacggcacgctggtgatgggggcgatcgctctgctgcgcggcgataattttatgccagaatggaccgtcagctatctgggcgccctgctttacctggcgctgttcggctcggtcatcgcctttggcgcctatttcactctcgtggggcgcatcggcgccagcaaagccgcctacagtacgctgctgtttccgctggtcgccttatccatttccaccgtctatgaagggtatgtctggcacagcaacgccgtgatcgggctggcgctgatcctgctgggtaacatggtgatgtttgccaaaccggaacagctattgctgcgccgaaggctggcctgaggaggctgaagaaaaacagcgccgtcgtcagacggcgctggcacgattaacgctgagagggatcgaatttaacggcgtcgaccgccatatcatcgataacctgcttcagggtatcgacggtcagcggtgtattctcattcgccagggttttgccttcccctttacgtacgaccttgatgaccggcttattggtgctggcgtcaatgacctccgcctcaaagtacagatcggtgtccatggtacgatggccggtggcggcctgggtgccggcgacaatcatagcgaccgggatcacttcatagaactgcagcccctctttgctggagtccaccccggtgatcgccccgcggaagatgaggctgcgcttgccggcggtagtggccagcggtttacgctcggaaatagcctgtttcagctctttgttggtgtagttaagaatatcctgcagcgccttctcccctacctgggtggtcggcttcggtaccggatagtaggtcaccgggtgataaacgatattgtcatagttggccggattgaagttcggatcgatccagcgcagctccggcttgccggaggcagaggtcgtttctttcaaactggaataatcttttaagaagcccgaatactgatccggttgcgccactttcgccgcgcagccggtcaacgccaatattcccgccagagcggcgactttcagtaaaacgcgagtacgcatagagagatccctgtaaatgcagtttttttttcggcagacgttatagcaaataggacccactagttttgtgacaaaaaaagggcttcgtcaaggaagatttataaatattgatggcctgaacattacgttaataaataatcacttaaaaggggtatcgcgcggttttccaggctcattttcgccgcaacgggtctctgtcttgcccaggctctggcggggaatgcggcgcgagccatgctcagcttcccacgccgcggcgaatcaggcaggcttgcgcgccaacagggtggcgaagcgcaatttgatgcgattgccgttggcgtcggtgcgatgcagctcgccgacgtcctcattgtatttcagcagctcccagccctggtaataatcacgaagctcatcaggtttaaaggcaaacgggaagccgacggtgcagggatagtcttcggtatccatcgccgccacaatcaggttatagccgccggcggcggtgcagcgctgcatattggcgatcaggcccgggatggtgtcaggctcgaggaacatcatcactacggtggagaggatcaggtcatactcgccatcaaagctcaggctgttgaggtctttcaccgccgtttgcagattatccagtcgctcggcggcgcgaatactttccagattgttgacgctcatcggatttttatcccacgccgtcaccgcgaagccgttcgccgccagataaaggctgttacgcccgttgccgcagcccagatccagcgcccgccccggcggcacaatcgtcgcggcatgcagcacctcggaatgggtgcgggtcaggctgtatttttgactaaaataatccgcgtcacgctttgtcatgatccttccttcttattcaggagtgtttcccggtcgacctggagcaacagtttcccgctgaccaacagcaacgctgtacgcagcagcagcaggccgacaaccagattgctaaaaataaatagcggcatcgccagatgatgaaaaaagccgtctcccctggcctggccgagatgcagaccggtggtggccagcgcggaaatgccgaacgaaaagctccagaaagaagcattgaacggctgacgaagataccagggcatcagacggagcataaacagcagctgcagcaggccgtaaccaaacagcagcttagcgaaggtatcggcctccccgccgttgacgctgagccaggcgctgcaggccaccagcgcaggcgccagctggatccccagcgaggtgcgcagcggcgtcggcagctcgcctgcgctgcgcagacgctggaggatcgccggctcgaggctcagccaggagaagaccccggcgccgaggaacaccagtccggcatcggaaaatcccagcgcgccgcaggccatcgcgctgataaaattattggctactgtcggcagatacaaccccggcgtggtggcctcgcgaggatggttcccccgccatagcccaccgctttgccaggcggcataggcgagctgcagcgccacgcccggcacaaacagcccgatcgccagcggccggcaccagggagccaaaccaatcgccaccaacagcgtggtggccggaaacaggctgacgaagctgctgctcaccggatgacgcatctcccgcagcacgctcgccggaaagcggatcgcccggctgataaacgccatgctgagcaggacccacatcgccatcgccagcgtcaccagcccatcaccaatgctgcggctgaccggccaaagggtgctggcgtaacgccaggcgaagcccattccgatggtgccgagcaccatgccaaaataacccgccggcaggtttagcacctgccgcggcgtttgcgttttattcattttattgatgatatcaatttaatttgaagttgcattctaaaggaaccttatcccgcgcgctatggcgatctttgctatgtttatgttaaccataagtaataaggatcggccatgcgtaaataccgtctcagcgaacagacccggcagtattgttatgaggaagagcatggcaaacaaagcgtcaccctgcgccagatcgtggcgcttattgatttcgctgacgttaaagcgggcagcgaaggcggctgggtggatgaggaatgcgctctcagccagcagggggagtgctggatctacgatgtcaacagcgtggtcttcgccggggcgcgcatccgcgacgacgcccgcttaaccgggttctgcgtggtcagccatgaggccaccatcggcggacaggcctgcattcacgccgcgcagatcagccatcacgcgcagatcagtgacaacgtcacggttacgcagagccaggtgcgcggttattgtcgccttgccgacgaggcgcgtcttctcccccactgccaggtgattgccgcgcgcgggttaaccgccgatcgcgacaaagtcctgcagatctatcagcgagccatcgtcagcgcctcgcgcattctccaccaggcgcaaatctacggcgatgccttcgttgagcatgcgtttgtcgaacatcgggcggaagtgtttgaccaggcaagacttgaagggaacgaagaaaacgacgtctgggtatgcgataacgcccgggtatacgggcacgcgcgtctgatcgccggtcgcggagaggatgccattcccaccgtgcgctacagttcgcaggtggcagagaatgcggtgattgaaggcaactgcctgctgaagcatcgggcgatggtcggcggcgaggcgcagctgcgaggtggtccgattctgctcgacgacgatgtgctgatccaggggcggacagtcatcaccggcgatgtgatcgttgagcaccaggtctccatcaatgacgaggtgcagattgccgcacaggagggagaggccattcatctgcgcggcccgaaaacgcttgacggccagcagcacatcacccgcacgccgctgttaggcgcgctttaatgcctcatcgcggtcaataatgcgggcgtagatattctgatcgtcatagctaccgttcagatactcggcttgtcggagacagccttccagaacaaacccgttgcgcaacgctacctggttgctgcgggtgttcgccacccggcatttgatcacaaaccggcgcaccagcccgctggcggcataatggcggataaaggcctgtaatgaacgggaaagcagcccttgcccctggtgctcttcatcgatccagtagccaatataggccgttttattctgcggctcgatctgattgaacgacaggaccccgactagctgcttatcgagaaacagcaaaaacattttggcgtaatcccgctgatgcagcatcacgttgccctgcacatggcggcgggtctcgtcttcgctgcgcacctcggcgggccaactgagcgactgctgtagccagcgctggtttttgaccaccagctggtgcaggtcgctaacgtagcgctcatcaatggcgattagcgtcagcgcgtcggttaccgggatcgactcaggtactgctaggatatctgcggtcatagcgctctcttctggcccgcagggactgcctgcgggcgtcgggtgactcagggttatttcatgatccgatcgtcaacgtagtttcgtttatctgctgccggcgggaaatactgatagagccaggtttcgctgatggcttctccctgacagcgcaggaacagacgcatctccaccgggtcggttgagtcggtggtcggataccagtcgaaaaggatccggtagccatcgaacggctcgacgtagaggatctcaatctgcttcgcttccccgctggagagggtgatcaccggttcaataccgcgcggcgcggccgccttcaaatcgccgccgacaaagtcgatggcaaaacgacgcgcccacttatccgggtagtgttcacccggcgcccatccttcggggaagccccccatcccggtgcgggtggccagaacgcgcgccagcggagtgctcaccggcggctgcgcgctccagtaaagacggtagcggaagtccagttcgtcgcccgccttcaccgccttttccggctgccagaagcagacgatattatccagcgtttcgccggtagttgggatctccatcaggctgaccgcccctttgccccactggttacgcggctcaacccacaggctgggacgcttgttataccagcccatcacatcctggtagtgggagaaatcacggtccagctgcaacagaccaaagccgcgcgggttcttgtcctggaaggcattgaactgcagcttctgcgggttattcagcggccggcagacccattccccgttgcccaaccacattgacagccgatcggagtcgtggatttgcggatggatggtgtcgcacatccgccgctcattattgccgcagctgaacatactggtcatcggcgcgatacccagctgtttgatatccttgcgggcgtacaggtggttttccacgtccatgataacctgggtatcctggcagtggatggtgaacttgtaggcgccagtgatgctcgggctgtccagcagcgcgtaaacggtaaacaccgtggcgtcccctttgaccgtttcgaaccagaacgacgtaaagtcgggaaactcttccggggtatcggtaaaggtatccaccgccagaccgcgggccgacaggccatactgataggtgctgtctaccgcgcggaagtagctggcgccgaggaacgccacgatatcgcggcgcgccagctccggcgctttaaacacccggaacccggcgaagccgaggtcagactgtccttccagctgacgggtatccacaccggcgtcattgtacttaaacagctccggacggaagtggatctcgcgcgcctgctgggtgctggcgtctaaagagaacatccgcacgcggcgacggaaccccatcccgacgtggaaaaactggatgtccagcttacgctcttcaatattgttccacagcgagtggttggcatcgtactggatgctgttataggcctgcggggtgagattggcgagcgtcggcggcagatcgcgcggggcgccgccccacggctggcgcgccagatcgtgagccatcgcctgcagaacagcataatcaaaacgacgcgtttgcccgtcggcaatgcccgcgtcttcggcaaaagcggcctgactgaataaggaagcgactcctgacgttccgcatacggcggcaacagccatggaagatttaagaaaacgtctgcggttcatgcctgagaaagcgtccttctgcacgggtgaattgattcgcaacgcgtcatcacgctgcgtgataatttccgcccactctagacaaaaacgattaataatccaattgttgccagcagaaaaaaggtaaaaaagccctgtccagaggaacagcctgtttttttcatttcctctgacgtgtagccagggcatacacgctgcctgccgctttttacccctgactattcaagggaaatctattctccagtgctgaatattcaccccatgtatcgctcctcgccgcgcgcgttttttaggcacgattcgcgcaaatttccatcgcgcctggtgctaacttttccccgataaccgctatctttcttcacgttagcggccaacaggggagagccgttcgggctgtcccgccacgctctccagggaattcattcaggagtcatgccatgcaagtgaaagcagccgtcacgctgggctaccagcagccttttgtcatcaaagacgtcgaggtcgccccgccggggaaggacgagatattagtgaaaattgtcgccaccggcgtctgccataccgacgccgtgatgcgcgacaaccccggggttgtgcctatgccggcgatcctcggccatgaaggcgccgggatcgttgccagcgtcggcgaggcggttagcggcatcagggtaggagaccacgtggtgctcagctacgccgcctgccacgactgcgaaaattgtttaagcaaccacccttcggcttgcgaagattttaatacgcttaattttggcggccgacgcggggatggcaccaccccctaccggctgggagaccaggatctgtccctgttctttggccagtcgtctttcagccagtatgtggtcacccgcgccagcaacgcggtcgtggtcgacccggaggttgatctcaccctgctcggcccgctgggctgcggtatccagaccggtagcgggacggtgctcaaccgcctgaaaccggtggtcggcgaatcgctggtggtgtttggctgcggcgcggtggggctcagcgccatcatggcagcgaaattaaccggctgttcacagattatcgcggtggatatccatgccagccgcctcgccctggcgggcgaactgggcgccacccatcagatcaacggcaaggaacaggatgccgtcgccgtgattaaacaaatcaccggtaaaggcgcccactacgcggtggaaacgaccggcgtctccgctatcgttctgcaggccgtacacgcggtgaaaccgctgggaacggtggcgattgtgggctttaccggagatatcacccttaacgtgcagaacgacctgatggcggagggaaaatcgctggtcggggtgattgaaggcgacgccgtgccggcgctgtttattccgcggttggtgcaactctataaacagggaaaattccctatcgataagcttatcgcccgctatccgttggccgatatcaaccaggccttcgccgattcggcgtccggcaaggtgatcaagccggtggtggtcatgtgagataacgtcgccaccggtcggtggcgacagttgcgcattatgggatttattccagcgtcacgtgatgcttcatcacccggcgaaacagcgccagtctggcgcgcataaagcggttctccactttaaacccggcgcgcttatgcaagccaatgcgcaacaggcgatcccgcccgcgcaggcacgccggccagcgcactgcgccggaaagcgtctgctcgccgctggcgaggcgggcaaactgcgcccagtagtcagcgacctgagcggcgaaggccagatccgcttcgctggcgtactgccgcaccgggtcggtcaaccgcaggttatcaaacacgtagggcacctcgttgccatgccaggccccatgcgggtaggcgtcatgctccgcttccgcgacataatcaaaccagtagcgccagcacggctgacccacgcgctgttgcgcctgcatcactacataaccaagggtggtgaaggccatgtcgcggcatacttcccgccccagcgcttcatcgcccttcacgccgggatagaggagtttgatcagccccagccccagacggcgctctcggcgcagcttctggatctgcccggcaatatcgacgccgaacacggccatcacgctggcttcatcgctattggagccgatcatcaccggtatcggatgctggcggccggcaaagaaggtctccagcatcggctgcggcagcaccgcgtctccggcaataggcgctggcccggtattcagcggcgcggtgagcgaccagaaggcctccgcggggatcgcccgcaattcctcagcgctggcttgcggtaaggcgaagtgttccgccagcaggcgccctttttccagcgctttttcccgcggcagatcgggtagcgtatacccgctctgaataatcgctttatgaaacagccctttcgctttcggggaggccattagcgacagcacgctgcgcgccccggcggattcgccaaacagcgtgacgttggcggcatccccgccgaaggcgtggatattctcctgaacccactgcagagcggcaatctgatcgagcaacgcgaaattatagagacgttcgcccgcctcttcttccagcgccggatgggagaaaaagccgagatggcccagccggtagttaactgtcaccaccaccacgtcgcggctggcaagcgctttgccatcgtaaggcggcaggctgccggcgccgatggtaaacccgccgccgtgcagccagaccatcaccggcagcggctgcgctgcgctggccggggcccagacgttgagatataagcagtcttcgctgaaggcgccaggatcgccgccgccgagctcgcggcagtagtcaatgtcctgccagctggcggcggaaaaggtctcggctggacgtaccccctgccagcgggcggctggctgcggcgcgcgccagcgcagcgggcccacgggcggcgcggcgtacggaatgccgcgccagatatgaatcccctgttctgcgctcccggccagcgttccctgacgggttttcgccaacggtttcgacggatgttgcataacctgctccctgtaaggctgatgccagcagggtactgattttacagcagaccgcaacgtcgtttgctgcgctcctccgcctgtcggtatagttcaaactcatcctgcaccgggcagcccagagctgcctcaaacgcctcgcgactggcgttcccgtggctgcgcgcctgggtttcgttgcccagattggactgaaaaatgcccgccgcgctgaccggtaaaaaatcttcataaataatcggctgggcgaccacccacccgcgctcaatcagcggctgcggatcgtcgcccgggcgaaacgcctggcgatgtgcctcacccgtgggcgtcaggcggtagcgaaaccaggccagcccctgctgacggagcagaaattcgctgtcgggaaattcgctaaacacctcctgtagatgctgctggtggctgagattgtctttcccggttcctgccgcctgcagcagccgatcgtacagcgcgcgccctttcggcgtcagcgccacgccccgctgctcaatttcgccaaagcgggcgctatgggtgcctcggtgttctccggcgaacatcaccggctcctcaagcgccttaaagctggtctgccgcaggaggatcgggacctcccggcgcggtggcccttcaatcaacgctttgggttcaataccgcactccggcatcagggactggacgcggtcaatatccagcgtccgcggcgtgagatggttgatatgacaccccgggaaacagaccacatcggcaatcaggcggtgctcgcgatgcagagcatggtaagtctcctcatcgacggtggcttgccggtgccagcggaacgtctccagcgcctcctggacaaactcgcgcgcgtcggcagaggtgaattcgccctctgcttcatactgcgcaatcagcgccaggcagcgggggtgaagattttgcgccgcgcgaggatcgcctcggcccgctcgcgcagggcgcgattttcaatcagctccaggcgcagcagcgaggtgaaaatccgaaatggattgcgcgccagcgcggcatcgtcgatgggacgaaacgccgtggagtggaccggcacgccggcctgcgagagatcgtaatagctaacgggatacatccccatgatggcaaacatgcgacggagcgtcgccagttcttccgctgtgcccacgcgaatcgcgccgtggcgctccacgtttaagcgcgccagctcgtcagcgttagcgagctgttcatgcagctgcggataattttccagtaccgccaggttgacgtcagccaccagctccagcagcgttccgtactgcggaacttcctgctggtacatggccgacatggcctgcgaaaagtgctcccgaatctcatcagccgtgatggtgttcgccatgatgtgttacctccagtgaatacttcctggagtgtaggaaagctgcctcgccgcggggggaagaatttacaaactgtgatggcgataacctgccgccggtccaggtcattgcgcaaaacataacccatagttatgaaaaacaccctgtaatttcactttaaattaacaatacatttacacacactgcttctggcgacattacaacaatatgcccctctaccgtctacacggagtaccctatgaacgacaaatggtccccacgtgaggttgtccatcgcgattacagtagccacccgcccgcttacgcgccgggctataaaaccagcgtcctgcgctcgccaaaaaacgccctcatctctctgcagaactcgctgtcagagatcaccggcccggtatttagccgcgacgacctcggccctctggataatgacctaatcctgaactatgccaaagaaggcctgccgatcggcgagcggatcatcgtccacggttacgtgcgcgatggattcggccgaccgatgaaaaatacgctggtggaagtctggcaagccaatgctggcggtcgctaccggcataaaaaagatcagtatctggcgccgattgacccgaactttggcggctgcggccgggtgcttaccgatgaaaacggctattactgttttcgcaccatcaaacctggcccctacccctggcgcaaccaggccagcgactggcgtccggcgcatatccatttttctctctcaggcgacgcctgggcccagcgcctgatcacccagatgtattttgaaggcgacccgctgattaagcagtgcccgatcgtcaggactattaataatgacgacgccgtgcgcacgctgatcgccgagctggacatgcacgccgccgtaccgctggattgtctggcctaccgcttcgaccttgttctgcgcggccaccgcgccacgctgtttgaaaatcgcactcagggggccgcccgatgaaagagtatctgcctgaaaccgcctcgcagacggcgggaccctatgttcatatcggcctggcgccggacgccgcaggctttcatatttttgagaaaaattttggcccggtcctcactaccgccgataccgccggggagcgcatcaccattgaaggccgggtcatcgacggctccgggacgccggtccgcgatgtgctgctggagatctggcaggccaacgccgcgggtcgctataaccatcctgacgatcgtcaacagcataaagccgtcgacccggccttccgcggctgggggcgtacctgctctgatttcacctccggcatttggcgctttgaaaccatcaagccgggcccggtggtcggtcgcgatggccggctgatggcgccgcacgtcaacctgtgggtggtggcgcgggggatcaatattggcctgaatacgcggatgtactttgccgatgaacacgaggccaacgccagcgacccggtgctgaatctcatcgagtgggaggtgagacgcaaaaccttaatcgccgagcgcgaggttcgcggtacggaagtggtctatcgttttgacattcatctgcagggcgagaacgaaaccgtctttttcgatatttagccgtcgcggtgaccaccaccttcgccccgtttctgcggggcgaaggcgttttcaaccacagggaaagatcttgtcatgtaaccaactcaaatgttaataatattttgctatctggttatcaaatttaaacaagtccgcttgtctctttcaccgctgtgtttttaacatcatcttactatggaaaaaaatggtctcttcagtcagcgcattcgcttgcgccatctacacaccttcgtggccgtcgctcaacagggaacgctggggcgcgcggctgaaacattaaatctgagccagccagcactctcgaaaacgcttaacgagctagaacagctgaccggtacccggctgttcgagcggggtcgtcttggggcgcagctaaccctggtcggcgaacagtttctgacgcatgccgttaaggtgcttgacgcccttaattcggccggccaggcgctgaaccgcaaagagggcctgaataacgacatcgtgcgcatcggcgcgctgcccaccgccgcgctggggatcctgccgacggtgatcggccagtttcacaagcagcaaaaagatatcacgctgcaggtcgccactatgaacaacaccatgctgctcgccggcttaaaatccggggagatcgacatcggcattggacgtatgtccgacccggagctgatgagcgggctgcattacgaactgttgttccttgaatccctgaagctggtggttcgcccgggacatcccctgcttcaggagacggtgacccttagtcgggtgatggagtggccggtggtggtctcacctaaaggcaccgtgccgcggcaaaacgccgaagcgctgctccagagccagggctgtaagatgcccgccggctgcatcgagaccctctccgcctccctgtcgcgccagctgacggtggattttgactatgtctggtttgtcccttccggggcggtaaaagacgatcttcgccgtggcgtgctaaccgccctgccgatcgccacccagggcgccggagagcccatcggcattttaacccgcgtcgatgcgacactgaccccgggtacgcagacgctgctcagcgctatccgtaagtccatgcctgcctgacccccctttctccccggcccgcagcggccggggaacctgcaaacgcgccgacgccgctccccatgacgttagacatattcggcaaaataatcatttagtgcgaaattatttattaacatttgcgcaaacttctttaacagatctatcatgtctcgatttcaccaaatggttcactcgaaatctaatcaagcaacaaatacagttttatgaaggttaaaaccacttcattcaaaaatgattcaaaagcaacatgtttcatttggttcacagtgaggtggctggtgtggttaaggagattacatggcaactggcaacgcgccgcgcggattcccccggatcctgcagtggcttctcgccggactgatgctcatcatcggtctggctgtgggtattcttggggcaaaactggccctcgtcggcggtacactgtacttcgcgctgatgggcgtggtcatggtcatcgcggcggtgttgattttccgcaaccgccgcggcggtattctgttatacgccgtggcgtttatcgcctcggtgatctgggcgattagtgacgctggctggaactactggccgctcttctcgcgcctgtttgcgctcggcgtactggccttcctggccgccctggtctggcctttcctcgccagcccaccggcgaaaaaaggcccggcctatggcgtcgccgccgttctcgccgtggcgctggcggtgagctttggctggatgttcaaatccgcaccgctggtcagcgcgactgaagcggtaccagtcaagcccgtcgcgccaggcgaacagcagaaaaactgggcgcactggggtaacaccacccacggcgaccgtttcgccgccctcgaccaaatcaacaaacaaaacgtcaaccagctgcaggttgcctgggtagcgcatactggcgatatcccacagagcaacggctcgggcgcagaagatcagaacaccccgctgcagattggcgatactctctatgtctgtaccccttacagtaaagtgctggcgctggatgtggacagcggaaaagagaaatggcgctatgactccaaatcctcttcacccaactggcagcgctgccggggcttaggctattatgaagatagccaggcgcaaaccgcgccagcggcaggcacgcagccggccgcctgttcccgtcgtctgttcctgccgaccatcgacgcccgcctgatcgccattgatgccgataccggcaaactgtgcgaaagcttcggcgatcgcggtattgtcgacctcagcgtcggcatgggtgaagtgaaagcgggttactatcagcagacctccaccccgctggtggcgggcaatgtggtggtggtgggcggccgcgtcgcggataactactccactggcgaaccaccgggcgtggtccgcgcgtttgatgtccacaccggcaaactggcatgggcgtgggatccgggcaatccagcgctgaccggtgttccgccggaaggccagacctacacgcgcggtacgccaaacgtctggtcggcgatgtcctacgacgcgaagctgaatctgatctatctgcccaccggcaacgccacgccagatttctttggcggcgaacgtaccgcgctggacgataaatacagctcctctatcgtggccgtggatgccaccaccggccaggtgcgctggcacttccagaccacacaccacgatctgtgggactttgacctgccgtctcagccgctgctgtacgatctgcctgacggcaagggcggcaccaccccggtgctggtgcagaccagcaagcagggcatgatctttatgctcaaccgcgagaccggcgagccggtggccaaagtggaagagcgtccggtgccggcgggcaacgtcaaaggtgaacgctactcgccgacgcaaccttactcggtagggatgccgatgatcggcaaccagacgttgaccgagtccgatatgtggggagcgacaccgttcgacctgctgctgtgccgtattcagttcaaagagatgcgccatcagggcgtctttaccccgccaggtgaagaccgttccctgcagttcccgggctcgctcggcggcatgaactggggcagtgtttcgctggatccaaacaacagcctgatgtttgtcaacgatatgcgtctgggcctggccaactatatggtgccgcgcgcgaaggtggcgaaagacgccagcgggatcgagatgggcatcgtgccgatggaaggcacgccgtttggcgcgatgcgcgaacgtttcctgtcgccgctgggcattccgtgccagaagccgccgttcggcaccatgtccgcggtggatctgaaaaccgggaaactggtgtggcaggtgccggttggcaccgtagaagacaccgggccgctggggatccgtatgcacatgccaattccaatcggcatgccgccccttggcgcatcgctggcaacgcagtccggactgctgttcttcgccggcacccaggatttctacctgcgcgcctttgataccgccaacggcaaagagatctggaaatcgcgtctgccggtcggcagccagtccggcccgatgacctacgtctcaccgaaaaccggtaagcagtacatcattatcaatgccggcggcgcccgtcagtcaccggatcgcggcgattacatcatcgcctacgcgctcccagaccatcactgatcgacataaacaaaagggcccatccgggccctttttttatgggtgacgattcgccttcagcgtcggggattactggtcgccaaagtggatcacggtgcgaatcgatttaccttcatgcatcagatcaaaggcctcgttaatctgctccagcggcaggcgatgggtaataaacggatcgaggcgaattttacccgccatggcgtcttccaccatgcccggcagctgactgcgcccttttacgccgccgaaggcggaaccgcgccacacgcggccggtcaccagctggaacggacgggtcttgatctcctgcccggcgccggctacaccgatgatcacgctctcaccccagcctttatggcagcactccagcgccgcgcgcatcacatttacattgccgatgcactcgaagctgaaatccaccccgccgtcggtcaactcaacgatcacatcctgaatcggcttatcgtagtcgttcggattgataaaatcggtcgcgcccatctctttagcgagagtgaacttatccgggttggtatcaaccgccagaatgcgcccggcctgcgcctgcaccgcgccctggatcaccgccagaccaatgccgcccagaccaaagaccgcgacggtatccccggccttgaccttcgccgtgttatgcaccgcgccgataccggtggttacgccgcagcccagcaggcacactttatccaaaggcgcctgcggattgactttcgccagcgaaatctcggcgcaaaccgtatattcgctgaaggtgctggtgcccatatagtgatagatcggttcgccattgtacgagaaacgagtggtgccgtccggcatcagtcctttaccctgggtggcacgcaccgcctgacagaggttggttttacccgacttacagaatttgcactcgccacattcggcggtatacagcggaatgacgtgatcgcccggcttaaggctggtgacgccctcgcctacttccacgacaatcccgccgccctcatggcccagcaccgccgggaagacaccttccggatcgtcaccggagagggtgaaggcatcggtatgacacaccccggtgtgggtgattttcaccagaacttcgccttttttcggcggcgcgacgtcaatctcaacgatttttaacggctgaccggggccgaaggccactgctgcgcgtgatttcataactgtctcttcctcgtcgtgatgttattttaaataggatcgtagcagatgaccgacctctgccattctcgcggcccgctgctcaggggtggtgtcgccgctgaccagctcgtcctgcaggtggatctccaccatttcgcccatcaggccgttcgccgccccgcgaatcgaggcgatctgctgcagaatagtcatacagggctcgccggactccagcgcgcgctcaagggcttcgacctggccgcggatgcgtcttacgcggctgagcgcccgttttttatcttcaggtgaatgtggcacgattacgcctccgtatcatataggggggtatactatattctattaacggtgaaggcaaaaaaaaaccccgtcgcgggacggggtcaggaagtgaaagaggatgatttagcgcttacgaggcatcattcgcagcagagtattatccttccaccagtaatgatggagcagcgcggcgagagcatgcaggccaatcacaaagtacccggcattggccaaccattcatggatcgccttcagggtatccacccgctcaaaatcgctctgcggggcatacggcatggtcagaccaaaggcataccaggggttaccgcgccagtacatcatcaccatgccgatcaacggcaaggcaatgaacagcaaatagatcgccaggtgaccaagatgggcgaaaccggtcatcatcggcgatggtttcggtacgatcggcggcgccggcgatttcagccgcaccagcagacgcgccaccatcagcacgaaaatggtgatcccgcaggaaacatgcaccatattaatcaatggccgttcactgcggggaaaaaacccgcgcagctccatcgccgcataggctactactaccagcaaaaaaaccagccagtgaatcccaatctgcaggccggaatatttatcgcgcatggcatatcctttatggaaagtatgatgctgccaacatagcggcgttcccttaaattttcattaacctttacgtagaattaacaattgattaccgctttctgccgagccgctatgccacgcttaacgcacgctctttcctggccgaacgacaaaccgtccaccggtcattacaaaattacacagttttgttacttaccgcgctactgccgccgctatagtacagaatgtctggcagaccacacggccctgggagataagaatgaaggaaatcggcttaccgttattgctactgaccgcgctggccagtccggcttttgctgcagactgtcagccaaacggcattggcggctctttttgcattaacgatgacggtacgactaccgacacggtgcctaacgaagtcaacggcatggatacgtactcgaataatggcggctataccagttccctgcccgatcggtcaggggcggatgaagcactggaaggttcatcgctgtcgacgcagcaaggcgtcggcagcggacagagcgacagtgcgctggcgggtcgcgactggcattcgcccgccaatctgaatgatggcgccgccgcctccagtatgagcctgctggataaaccctgaggccagcggctaagcgagactccagcctgcggcgccgatggcgagggcgaaaagcaggcaggccagcgccgtcttgcgtaacagcatggtatagaatgaaattgcgacgccaatgaataccaccagcagaatcggccacatgcttaataacaacagcagaaaaccctcaatattgttatggattacgctctccacatccgcatccttgcctcatcgtcgataaagtaagcagaatttaatatgtaacatgaatacattcaaataaaatataattgtaaatggttatgcaccgcctcctgcggttggcggtgggtcactttcacgcgtccggagctttggcatcagaagcagttcgcaaaaaaacacgtcaggattgttccatgaccctttagcggtacgctcgtattctcgctggtatcctgcaaattcttcacgccattattcggcgcgggtatcggacacaatgcgccggcgatgacagtcgcctggttgcagtttatccccctgagcggaacgcacatccagatactgaaggggctggccgtgcgcgttatccagcaggaccgaataggtttccccttgctcaaacatataacgctctccccattgccgcagcgccacaacaatgggaaacacggagcgccccttttcagtcaggacatattccttgtatgcgctgccatccgatgccggtaaaatctcgaaaataccgatatcaaccagatgcttcagccgcgaggcaaggatatttttggccagccccaaatttttttgaaactcgctgaatctccgcacatcgtcaaatgcttcgcggataatcatcaggcaccagcgttcaccaattgattccaacgttctcgccaccggacattcactggttctaagtgattcctgctttgccatctgcgcgctccttatcaatttatctactgatctagcttaatcctcacctttaccagttgcaaaaaaaaaccagcaaggctaattctataggtacactagttttaaaaagcaaccagacagagggtctcttatgaaatgtaaggcaagtagatgtaccggccaaaggatccaaactgcgtcagtccctgacacgatgctgaccacagggataacggcgttgttttcactaacctgcgcgctggcagtagccaatgtttattcagcacagcctttactcgactcgatggcggtcagcctgaaggtgtcgccaggcatgattggcagcgtcatcaccgctacgcaggcgggctatgccattggcctgctgttcctggttccgctcggggactggttgaaccgtaaatacgtggtgatgagtcaactgttgctttcagtagcggcgttagtcgcggcagggttatcccccaatatagtaactctgcttggcgccatgctgatcgtcggcctgatggccgttgtggtgcaggtgctggtggcctgggtggcaatactggcgacgccgcagaaacgaggccaggcggtgggtaccctgaccagcggcattgtttcaggcatcctgttatctcggtttatctcaggcgcgatagccgatatcgccggctggcgagccgtgtatctcacggctgcctgtctgatgttgatgattgccgggatcgtctggaaaatcatgccttcgcccccgcagcagccgcagccgcaaaagccgacttacctttccttattgaagtccgtgtttcagctgtacctcaccgagccgcaactgagaaagcgcgggatcctggcgctatttatcttcgccgctttcagcatgctatggacgaccatggtcatgccgctcaccgccctttccctctcgcacacccagacggggatgtttggcttagccggcttcgctggcatgctggccgccgccagagcgggcaagtgggctgaccagggatgggctcagcgcactaccggcctggcgctggcgctgctgaccatctcatggcttcctatcggctatgccgaaacctctctgctttggctgatagctggcgtcattgcgctggactttgcggtacaggccgttcatgtctccagccagagcctgatcattgccgccaggcctgcagcggcaagccgcctggttggggcttacatgtgtttttattcgctgggcagcgcggcaggggctatcgttgccacacagctttattcccactggggatggcaggcggtctgccttgcgggcgccgcggtcagcgcgtgtgcatttctgatctggtcaggatcgcgtcaatcatgatattcgttctgcgttttaaaggggcccgtcaaaaagaccgtaacgctgacctgattgctgccagctatttgtatcgcatacattttttcaatgcttttaaacagttatgttcatgttgtataatgacgtgcactttaactaaaaaaagagtgcgaccatgattgattcctcattgccattaaccgacattcatcgtcatcttgacggtaacatccgggcccaaaccatcctcgatcttggccgcgaatttaatatcgctcttcccgcaaccaccctcgacacgctgcgtccgcacgtccaggtcaccagccttgagcccgatctggttagtttcctcgccaagctcgactggggggtaaaggtcctggcctcgctggaagcctgtcgccgcgtggcgtatgagaacgtcgaagacgcggcgcgaaatggcctgcactacgttgagctgcgcttctctccccgctatatggcgatgacccaccggctgccggtcgacggcgtggtagaggcggtaattgccggggttcaagagggatgccgcgatttccaggtcgacgcccggctgatcggtattctgagccgcaccttcggcgaagccgcctgtcaggaagagctggcggcgctgctcgcccaccgcgagggcatcactgccctcgacctcgccggcgatgagctcggcttcccgggtacgctgttccgcaaccattttaaccaggcccgcgacgccgggtggcatatcaccgtccacgcgggcgaagcggccggcccggaaagtatctggcaggccattcgtgagctgggcgcggagcgcatcggccatggggttaaagcggtagaggatccagccctgatggactacctggccgagcaccgcatcgggattgaatcctgcctgacctcgaacgtgcaaaccagcaccgtggcctccctggcccagcatccgctgaagcagttccttgagcacggcgtgctggcgagcctcaacactgacgatccggcggtccagggtgtggacatcattcacgagtataccgtggcggcgccggcggcagggctgagccgggagcagatccgtcaggcgcagatcaacggcctgaccctggcgttcctcggcgaacaggaaaaagccgccctcattcagcgggttgccaaaggctgataaccggcccggcagccgtgctgccgggctcctcctcagaccaggctgagcgtggcgcgatgtctggccgactcgatacccaactcaatcagggtcattatctgaatcgcctcgctggccgagaccgggttttcccctacgccgttaagcgcgtcgcggatagcggcatagtaagcgggataattacccggtagcgtcagccatttctcctgactacgttcatccccttccgcacgggtcagggtaccgtcgcgcatatcatatccccagtcctcctgcggcagccgttcaccgttttttagccgctcctcctgcgggtcaaggccgtacttaatatagctggcccgcgagccgtggacgataaagcgcgcgctctccgcggcggcgagtaacgtaccatgcagtactacccgccgctgcggataggccagcacggcgtgaaaatagtcggtggattgcgcgccgggccgaagctgcgcgaggtccaccgtgatgcttaccggcaggccaaacagcaccacgacctggtcgagcagatgcggcgcgaggtcataccatatgccgctgccaggacctgcctgctcacgccagcgctggcgcacctgtggtcggaagcgatcgaaatgcgactcgaagtaacacacctcccccagctgaccttcgttgatcaacgcgctgaccgttaagaaatcgctgtcccagcgccggttatgaaacaccgaaagtatccgaccgcagtgcttcgccaggctttccagctcgcgagcttgtgacagtgtcacggtaaaggatttatccaccacaacatgctttcccgcctccagcgccgctttcgccagcggaaagtgggtgtcgttcggggtggcgatgaccaccagatcgatatccgggtcgtccagcagatcccccggcgcactcattaccttcacgccaggccaatcggcatggaccttatcggcgtcgctgctggcgaccgccttcagcgccatacccggcgtgccgccgatcaacggcgcatgaaacgttttgctggcgtaaccgaaccccaccagccccacccggatcgcatcgctcatcttaccgcctcgcttatgcaactgatatcaacaccaggttaatgagaataattttacaaaccgtgagcaaaacttatcattccttactttgcgacttacatgcaagtgtgagaaatcagacagataccccttgtgatctgctgaccatcgagtaacatttcacgctgtgttcaaaggatattgaagtgttatgacaactgtttttacccgtattgtagaacttattggctgggttgtttttggtatttcggcactgcttttggttatcgcacaccatatagataactatcagtccccaccgccagcggatgtggtgcacacgaagtagctccgcgttaaaacagtgacccgcctcgcaactgtgcaaccggtttcagaaaccggttgcacgtatgctcgcgcttttattacactccctttatcatcagacagggagctttttcatggccgcttttccgcacaatttcttatggggtgccgctaccgcagcgtatcaggttgagggaggacacgacgccgacggtaaaggaccgtcaatctgggatatctactctcatctgccgggtaccacctttgaaggcaccaccggcgatattgccgtcgaccactatcaccgttttcgcgaagacgtggcgttaatggccgaaatgggcctgcaaagctatcgattctccatctcctggccccgcctgctgcccgccgggcgcggtaaggtgaatgaagcgggagtccagttttacagcgatctgatcgacgaactgctggcgcacaatattgagccgatgatcaccctctatcactgggatctgccgcaggccctgcaggatgagggcggctgggaagcgcgcactaccgccgaggccttcgccgagtacgcccgcctgtgctatgcgcgctttggttcacgggtgaagctgtgggctaccttcaacgaaaccattgtcttcattgggcacggctacattaacggcctccatcccccggcggtccgcgatccggcgcgtgctattcaggcctgccaccacgtatttatcgcccatgcgctggcggtgaaggcctttcgcgagatggctgtggccggcgagattggcttcgtcaacgtactgcaaccgcataccccgctcaccgacagcgaggcggacattaaggccaccgaactggctgacgccatccatactcactggctgtacgatccggtgctgaaaggcacctatcctgccgacctgctggcgcagacccaggcgctgtggggggtacctcgctttgctccaggcgacgacgcgctgctccgtgacaaccgctgcgactttatcggtctgaattactatcgccgggaaacggtatctgcccagccgcctgagatcgctaccggcggtgagcctggcgtggagggattattctatttcgtgcgtaatccccagagtacatataccgaatggggctgggaaatctggccgcaggggctaactgacggcattatgatgattaaggcgcgctatggcgatattccgatatatatcaccgagaatggcctcggcgcgaaggacccgattattgacggggaagtggtcgacgacccgcggattgattatctcagcagccatattggcgccctcgaaaaagcgctggcgctgggggcagatgtgcgcggctattacccctggtcatttatcgatctgctgagctggctcaacggctatcaaaagcaatatggttttgtctatgtcgatcaccagcaaaatctggcgcggaaacgaaagaagagtttttattggtacaaatctgttattgccagtcacggcgaacagcgttaatcttctcttgcgggcgccattcggcgcccggtctgattttagaatattcttaaacttctccctgctcttcaaggctggctttgccccttgtcatgggtttatataacctgattcattccacgcggccccagcagaaggcgccgttggttgagagtaggtttagtgaatgctgataatattcaacgcaataattccgattataaaatggatacgaaaatgaccgtgctggactacttattaaaatttcgcaaaatcagttcgctggaaagccttgaaaaactatttgatcaccttaactactccctgactgacacccaggagatcgtgaatatgtatcgcgccgccgatcatcgtcgcgcagagctggtctccggtggtaaattgttcgatgtgggccaggttcctaaatccgtttggcgattcgtgcagtaaggctgtcatccttcacgccagttgcttatacttcccggcctgattttattcactggcgttgaataggggagaaacatgacgtctcaatctgcagagcgcatcggcggatggctgctggctccgctggcctggttgctggtggcgctgctgagcgcctcgttatcgctgctgttttttgccaatgcgctgatgtcgccgcagacctatacactactgcgcgccatgagcgcgggccatatggcgctgtgggtcgcctcgctgctgtttgccctcgccatgtggtattacacgctctggctgactatcgcctttttcaagcggcgctcggtggtgccgaaacactacattatctggctgctcatcaccctgctgctggcgataaaggcttttgccttctcgccggtctcggatgtgcttgccctgcgtcagctgctgtttccgctgctggccgctgcgctgctggcgccctattttcgccgttcgcagcgggtaaaacggacttttgttaatccgtaatacccccacacttaacctgttgtcgctggtatcgttttattcgataataagcggctttttttcgtctcaggtcgcatgatggctgattatttactgctctttattggtacagtcctggtcaataacttcgttctggtgaagtttcttggtctgtgcccgtttatgggggtttccaaaaagctggaaaccgcaatggggatggggctcgctaccaccttcgtgatgaccctggcctctatttgcgcctggctgattgatacctggatccttatcccgctaaatttggtttatttgcgtaccctggcctttattctggttatcgccgtggtggttcagtttactgagatggtggtgcgtaaaaccagcccggcgctctatcgcctgctggggatctttctaccgctgatcaccaccaactgtgccgtactcggggtagcgctgctgaatattaatctgggccacaatttcctgcagtcggcgctgtacggctttgccgccgccgtcggcttctcgctggtaatggtgctgttcgcggcgatccgtgaacgcctggtggtggccgatgtccccgcgccgtttcgcggtaatgccatcgcgctgattaccgccggtttaatgtctctggccttcatgggctttagtggtttggtgaagttgtaatgagcgcagtctggatagccgtgatcgccatcagcctgttagggctgattttcggcttaatactgggatacgcctcgcgtcgtttcgcggtgcaggacgacccggtggtggaaaaaattgatgagctattgccgcagagccagtgtgggcagtgcgggtaccctgggtgtcgcccctatgcggaagcagtcggcgtacagggtgagaaaataaaccgctgcgcgccgggtggcgaagcggtgatgttaaaaatcgccgccttgctgaacgtcgacccgcagcctgtcgacggcgatgcacaggaagcggagccggcccgcatgctcgcggtaattgacgagccgaactgcattggctgtaccaagtgtatccaagcctgtccggtggatgccatcgttggggcgacccgcgccatgcataccgtgatgagcgacctgtgcaccggctgcaatttgtgcgtcgccccctgcccgacccagtgcatttcactcgttccggtggccaccaccccggagacctggaaatgggatctgcatacgatcccggtgcgaaatattcctgtggaacaacatgtttaagctattttccgctttccgaaaagacaaggtctgggatttcaacggcggtattcacccgcctgagatgaaaacccagtctaacggcaccccgctgcgtcaggtttccctgccgcagcgctttgttatcccgttgaagcagcacattggcgccgagggcgaactgtgcgttaaagtgggcgaccgggtgctgcgcggccagccgctgacccgcggctggggaagaatgctgcccgttcacgccccgacctccggcaccattgccgccatcgctccgcacactaccgcgcacccgtcggcgctggcggagatgagcgtgatcattgacgccgacggcgaagaccgctggatcgagcgcgatggctggagcgactatcagacccgcacgcgtgaagcgctgatcgagcgtatccaccagtttggcgttgctggcctcggcggcgcaggattccccaccggcagtaaactgcgcggtggcggagataaaattaaaacgctgatcattaacgccgccgagtgcgagccctatatcacggcggatgaccgcctgatgcaggactgcgcggcgcagattgtcgagggtatccgcatcctcgctcatatactgcagcctgaagaagtgctgatcggcattgaagacaataagccgcaggccatctcaatgctgcgggcggtgctctgcgacgcccatggcatttcgctgcgcgtgatccccaccaaatatccctccggtggcgccaagcagctcacccaaattcttaccggcaaacaggtaccgcacggcggtcgttcatcggacattggcgtgctgatgcagaacgtcggtacggcttatgcggtgaaacgcgcggtggttgacggtgagccgttaaccgagcgcgtggtcaccctcaccggcgaagcggtaaccagaccgggcaatgtctgggcgcgtcttggcacgccggtgcgccatctattgaacgatgccggcttctgccccagcgccgagccaatggtgatcatgggcggcccgctgatgggctttaccctgccgtggctcgacgtcccggtggtgaagataaccaactgtttgctggcgccttccgccagcgagatgggcgaaccgcaggaagagaaaggctgcattcgctgcagcgcctgcgctgacgcctgcccggccgatctgctgccgcagcagctgtactggttcagcaaaggtcagcagcacgataaagccactgcccataatctggcggactgcatcgagtgcggcgcctgcgcgtgggtatgtccaagtaatattccgctggtgcagtacttccgtcaggaaaaggccgagatcgcggcgattcgtcaggaagagcagcgcgctgcggaagccaaagcccgattcgaggcccgacaggcgcgcctggagcgtgagaaagccgcgcgcgccgagcggcataaaaaagccgccgttcagcctgccgccaaagatcaggaggcgattagcgccgccctggcccgggtacgggataaacagcgcgatgccgcgcagccgatcgtgatccaggccggcgccaaacctgacaacagcgaggcgattgccgcccgcgaagcgcgtaaggctgaggcccgggcgcgcaaagcgcagcagcaggccgcgccgatggtagccccggccgccgaaccggtcgatccacgcaaggcggcggtggaagccgctatcgcccgcgccaaagcgcgtaaagccgaacagcaggccgagccggtggacgccccggccgccgaaccggtcgacccgcgcaaggcggcggtggaagccgctatcgcccgcgccaaagcgcgtaaagcagaacagcaggccgcgccggtggacgccccggccgccgaaccggtcgacccgcgcaaggcggcggtggaagccgccatcgcccgcgccaaagcgcgtaaagccgaacagcaggccgcgccggtggacgccccggccgccgaaccggtcgacccgcgcaaggcggcggtggaagccgctatcgcccgcgctaaagcgcgtaaagccgaacagcaggccgcgccggtggacgccccggccgtcaaaccggtcgacccgcgcaaggcggcggtggaagccgctatcgcccgcgccaaagcgcgtaaagccgaacagcaggccacacaacaggatctcgcgtcagccgcagccaatgacgacccgcgcaaagcggccgtcgccgcggctatcgcccgcgttcaggcgcgtaaagcaacacagcaggcagttaacgaggaataaatggttttcagaatcgcaagctccccctatacccataaccagcggcagacctcgcgtattatgctgctggtgctgctcgccgctgtgcctggcattgtggtccagacctggtttttcggctggggcaccgtactgcagattgtcctcgccgccctgacggcctgggcgaccgaagccgctattctcaaactgcgtaaacagcctgttgctgccacgctgaaagataattccgccctgctcaccggcctgctgctggcggtgagtattccgccactggccccgtggtggatggtggtgctcggcactgcctttgccgtagtcattgccaagcagttgtacggaggcctgggccataaccccttcaacccggcaatgatcggctatgtcgtgctgctgatttcgttcccggtgcagatgacctcctggctgccttcctatgagatagccgcccatatcccggcattcagcgacgcgctgcagatgatcttcaccggtcataccgccgccggaggcgacatggccagtctgcggctgggtatcgacggcgtcagccaggccaccccgctggatacctttaaaacctccctgcatgccggacatagcgttcagcaggtgctccaattgccggtctacggcggcgtgctggcaggtctgggctggcagtgggtgaatatcgcctggctggcaggcggccttttcctgctgtggcagaaggcgatccgctggcatatcccggtcagcttccttgttagcctcggcctgtgcgccaccctcggctggattttttcgccgcagagcctggcctcaccgcagatgcatttgctctccggggcgaccatgcttggcgccttctttatcctgaccgatccggtgacggcctcaacaaccaaccgcggccgtctgatctttggcgccctcgctggcctgctggtctggctcatccgcagcttcggtggttatccggacggcgtggcgtttgccgttctgctggcgaatattaccgtgccgctgatcgattactacacgcgcccgcgcgtatatggccaccgttgagagagcaatgatgttaaaaacgatgcgtaaacacggcgtcacgctggcgctgtttgccgccggttccaccgggctgacggcggcgatcaatgagctgaccaaaagcaccatcgaccagcaggcggccctgcagcaaaaggcgttattcgaccaggttttacctgccgaccgctataataacgatctgcttaagagctgctatctggtcagcgccccggcgctgggcaaaggccagcataaagtgtggatcgccaaaaataacgatcgaccgatcggcgcggtgatggaagccaccgcgccggacggctactccggagcaatacagctgctggttgccgccgattttagcggcacggtcctcggcacccgcgtaactgagcatcatgaaacgccgggcctgggtgataaaatcgaacttcgcctgtcggactggattacccattttgccgggaaagtcatccacggccagggcgatagccactgggcggtcaaaaaggatggcggcgattttgaccagttcaccggcgccaccatcaccccccgggcggtggtcaatgccgttaagcgcgcaggcttatatgcacaaacgctgcctgcgcaacttcctgaattcaccgcctgtggagaataaccatgagcgaagttaaagacgtcatcgtccagggcctgtggaaaaataactccgccctggttcagctgttaggtatgtgtcctctgctggcggtcacctcgaccgccaccaacgccctcgggctgggtttggccaccaccctggtgttaaccctgaccaacctgaccatctccagcctgcgccgctggacgccggcggagatccggatccccatctacgtaatgattatcgcctcggtggtgagcgtcgtgcagatgctgatcaacgcctatgccttcggcctctatcagtcgctggggattttcatcccgcttatcgtgaccaactgcatcgtggtcggccgcgccgaagcctttgccgccaaaaaagggccagcgctgtcggcactggacggtttctcgatcggcatgggcgctacctgcgcgatgtttgtgctgggctccctgcgcgagatccttggcaacggcaccctgtttgacggcgccgacagtctgcttggcagctgggcgaaggttctgcgcatcgaggttttccacaccgacccccctttcctgctggctatgctgccgccaggcgcctttattggcctcggtatgatgctggcgattaaataccttatcgatgaacgtagcaaacagcggaaggcgcaagcggcccgggccgtctctgtcgccccgtccgacgtgacagggaaagcataatatgaacaaagccaaacgcctggcgatccttaccaggctgcgggaaaacgatccccaccccaccaccgaactgcatttcagttcgccattcgagctgctgattgccgtcctgctttctgcacaggccaccgacgtaagcgtcaacaaagcgacagccaaactctatccggtggccaatacgcccgcagcgatgctggccttgggggtggatggggtgaaatcgtatatcaagactatcggcctgtttaacagcaaagcggaaaacgtcatcaaaacctgccgcatcctgttggagcagcacaatggtgaggtgccggaagacagagcagcgctggaggcgctacccggcgtgggccgtaaaaccgccaacgtggtactaaataccgcctttggctggccgaccatcgccgtggacacgcacatcttccgcgtctgcaatcggacgcaattcgccccgggcaagaacgttgagcaggtggaagagaagcttctgaaggtggtccccgccgagtttaaggtcgactgtcatcactggctgatcctgcatgggcgttatacctgtattgcccgcaagccgcgctgcggctcctgcctgattgaagatctttgcgaatacaaagataaagtctacgcctgactgtctcgtctctattgcggtcatagcttaactctgggttatggcccgcattcatctatttcaccggccattaacaccacataatcatcatgattatggatgattatccggttatataacaaacaactagttcattcattttttatcagcgcaaaatttctatgcatttgtgatccagatcatgctcgcaactttatgttgattgaatgttactggaatggaaataaatgtcaggcaatacaacggatgagtaaagattgtcaggataatggcccatgattttttaagataatggaccatatcactatgcttacgccagatcagtagaatatatcgccttttcccggcaaaccggcgaacccaaaagataaaaataccaacgatatcgaaacggtaaaatttaacgctgtataacattcatatgtccggagcattataccaccctgattatgtgtaacagattattacaaaagccttgcctgatgcgccaggatagtgaacattacttgccgttttccctccaagaataactataaaggcggcggtccaacgagattgcgccccgaacaccccccagtaaatatgggatgtaaaaaaagaggtatatgtgtctactgcaaacaataaaccagcagaaagcgtgagtctgaacgctttcaaacaaccacgcgcgttctatctcattttctcgatcgagttgtgggagcgttttggttactacggcctgcaagggatcatggccgtttacctggtaaaacagctgggtatgtcggaagcggattccattactctgttctcctcctttagcgcgctggtttatggcctcgtcgccattggcggctggctgggtgataaagtgctgggtaccaagcgtgtcatcatgctgggcgctatcgtgctggcgattggctatgcgctggtggcctggtccggtcatgacgccgctatcgtctatatgggtatggcgaccatcgccgtcggtaacggcctgtttaaagccaacccgtcctccctgctttctacctgctatgacaaaaacgacccacgtctggacggtgcatttaccatgtactacatgtccatcaacatcggttcgttcttctctatgctggcaaccccgtggctggccgcacgttttggctggagcgtagcgtttgccctcagcgtggtggggatggtgatcaccattattaacttcgccttctgtcagaaatgggttaaacagtacggctctaaaccggactttgccccggtacacatgggtaaactgctggcgaccatcgctggcgtggtggtgctggtcgctatcgccacctggctgctgcacaaccagggtatcgcacgtatggtgctgggcgtcgtcgcactgggtatcgtcgtgattttcgccaaagaaaccataggcctgaaaggcgctccgcgtcgtaaaatgatcgtcgctttcctgctgatggtagaagcgattgtcttcttcgtgttgtacagccagatgccgacctcgctgaacttcttcgccatccgtaacgtggagcactcgatcctcggtctcgcctttgaaccggaacagtatcaggcgctgaacccgttctggatcatgattggtagcccgattctggccgccatctacaacaagatgggcgaccgcctgccgatgccgcacaaatttgctatcggtatggtactgtgctctggcgcattcctcgtcctgcctctaggggcgaagttcgccagcgacgccggtatcgtctcggtcaactggctgattctgagctacgcgctgcagtctatcggtgaactgatgatttccggcctcggcctggcgatggtcgctcagctggttcctcagcgtctgatgggcttcattatgggcagctggttcctcaccacggcaggcgcggcgatcatcgccgggaaaatcgctaacctgatggcagtcccggagaatgtcaccgatccgctggtgtcgctggaagtgtacggtcacgtattcctgcagattggtatcgtcaccgcggttatcgccgccctgatgctgctgaccgcgccgaaactgaatcgtatgactcaggacgacagcgcggacattaaagcacgcgaaaccgcggctgcctgacgccgcagggaaaactaattatttttaagccgctaacgttagtttagcggctttttttttacccctggcaggactaacatacagaaaactgcagccacgaggagtcacgcatgaaactgttctacaaacccggcgcctgttcccttgcctcgcatattgccctgcgcgaaagcggtctggattttaccctgcagagcgtggatctggcccaaaaacggctggaaaacggggaagactatctgcagttcaacccgaaaggtcaggtgccggcgctgctgctggatgatgatatcctgctcactgagggcgtagccatcatgcagtacatcgcagaccaggtgccggatcgtcatctgctggcgccggtgggctcgattgcgcgctatcagactctcgaatggctgaactatgtggccaccgagctgcataaaagctttaccccgctgttccgcccggataccccggaggactataagcctgtcgcgcgggggctgcttgagaaaaagctgcaatacgttgatgcagcgctggcagacaaacagtggctgaccggccatcgcttcaccattgccgatggttatctgtttacggtgctgcgctgggcctatgctataaaactggatatggctgcctatggtcatatcggcagctggatgacgcaggtggcagcgcgtccggcggtggctgccgcactggcggctgaaggcttaaaataaggcctgaacctgcccggcggaccgtcgggcaggccctgggagttacagccgggtggcgctgaagcagtgctccggtacggcgatgcgatcctgcgccgctactacctgcagttcgtattcctgcatatttttggtggcgagcataatctcgtacaccgcggcggtgacgtgttccagcgcatcgcgcagacttgccccctgcagcaatttaaccaacagcagaccgctggtcacatcgccgacgcctaccggctgacgcaggccgaaatccaccagcggccgactaatatgccaggcttcttcggccgtcaccagcagcatctcaaaacgatccatactcagacccgcacgggcaagatgcttaactaataccacttccggcccctgggcaatcagctcccgcgcggcggccactgcctcgctgacgctggcgaccggatgaccgcacaggatctccagctcaaccagattcggcgcaataatatcgctggccggcagcgcatagcgcacgtggaactccgccacgcccggcgcgacgatgcagcccttctccgggtgacccatcaccggatcgcaaaaatatttcgccgccggattggccgccttaacctgacgcacgataccgaggatatgctctccctgctcagcggagccaagatagccgctcagtaccgcatcgcaggtctgcagtttgtcgatgtcggcaatcccctgaacaatctccgtcaaatgcgaaggcggcatgacgcagccggtccatttgccgtactgcgtatggttagagaactgtacggtattcaggggccagacattggcgcccagacggcgcatcggaaattcggcggcactgttgccggcatggccaaacacaacgtgagactgaatggcgaggatgttcttcattttcttaccacaaccctaaaaagaaaaagggcgtggtttcccacgccctggcagtatttttttatttccagcagaccaggcagtaatttttcttaccgcgacgcagcaaggtgtagcggccaaacaggcgatcgctgtcactgaatacatattccgggtcggcctgtttttcgccgttgatggtcaccgcgttagaggcaacggttttacgcgcctgaccgcgggacggctgcagctcggaatcaaccagcgcctgcagcagatcggcgcctttttccatttcgatcatcggcacgccatcctgggccagctgttcgaagtctgcttcgctcaggtcgctcaggttaccgttgaacaggctttcggtaatgcgcttcgccgcttccaggccttcttcgccgtgaacaaggcgcgtcacctgctctgccagcacgtactgggcgcgcggcgctttaccgctgtttttgtcttcttcttccagggcattgatctccgcaatgtccataaaggtgaagaatttgaggaagcgatagacatcagcatccgcggtgttgatccagaactggtaaaatttgtacggactggttttcttcggatccagccacacggcgccgccttcggttttaccgaatttggtgccgtccgctttggtgatcagcggtacggtcaggccaaacacctggttctgatgcagacgacgggtcagatcgatgccggaggtgatgttgccccactggtcagagccgccaatctgcagcgccacgccgtgcagcttgttcaggcaggcaaagtcgtaaccctgcagcagattgtaagagaactcggtaaaggagataccctgatcgtcacgattcagacgctgcttcaccgcttctttgttgatcatctggttaacagagaagtgtttaccgatatcgcgcaggaaggtcagcacgttcatgctgccaaaccagtcatagttattcgccgcgatcgccgagttgtcgccgcagtcaaaatcaaggaacggagccacctgtttgcggattttatccacccactcctgcacggtatcctcggtgtttagtttacgctcagcggctttgaagcttgggtcgccaatcagaccggttgcgccgcccaccagcgccacaggtttatgacctgcctgctggaagcgtttcaggcataacaatggaacaagatgccccaaatgcaagctgtcagcggtaggatcgaagccgcaatagagcgcgatcgggccttgcgccagtcgctctgctaacgcttcctcgtccgtcacctgggctaccagcccccgctcttgcaattgtttaatcaagttactgcttgccatcaaattctccatgtataaacgactgcacctctgccggtacacgacttttcgccagatgcgaaaagtacatagaataaagcgccggccctttcagcgccagcgcttcgataactaatttcggcgtttacggcgccagacggtctattttccaggcgccgctatcgcgctggtataaaaagcgatcgtgcagacggtgttctcccccctgccagaactccatctgctcaatgctgacgcggaatccgccccagaagctcggcaacggcacttcaccctgctggaacttctgcttcagctcgaggaatttgctttcgaggatgccgcgggctgagatccggctcgactgcttcgagacccaggcgccaatctggctgtcgcgcggacggctgtggaaatatttgaccacttccagcgtcgacagacgctccgctttgccgattaccatcacctggcgctccagcatatgccacgggaaaagcaggctgacctgcgggttgttttcaatttgatgcgctttacggctgccaaggttggtataaaacaccaaccctttttcgtcgtagtgcttcagcagcacaatgcgctggtagggctggccgcgctcatcgacggtggcgaccaccatggccgtcgggtcggcaagtttcgcatcgcaggcctgacgcagccagcgttcaaacagcggcaggggttcagcaggaagatcgtggcgacgcaaaccgccacgggtgtattcacggcgcaaatgcgcaatttgctggagttcgtcgttatcagacatggccattgaggatgtagtcataaggtggcgttattgtgcgccccccggacagaaatctcaacgtttggccgtctgcagctgacagttatcaaggacgatgcggtcgcgcttatagacggtggcggtatcgccttttgaccagaacacatagacgccgtcggtgtagcgcgccccggaagccgacagcccctcagacaggttcagttgctgattatcatagataaaactgacctgctggcgtgcgttattgcgatggaccgtcaatggtttctggtcgcattgatactccagcgtgtccgtctgcatccgctcgacaaactggttgtagtagctacagcccgccagcataaaaggtacaactgcgataagaatttttttcattcgtttgccttcgactttcccggtcacggcgggcactccgccctccgcttaacttgtccagtttaccggtcgcgtcgtatttaagatttcagttaactccgattctgcggcgggttagccggaaaaatggcgcccagcaccgaggcttcgctggcgccggtcacggagggcagattgcccggcagaccagccagcgttcgccaggccagccaggcaaaggccagcgcttccatatcatcgccgctgatccccgcctcatcggtggtggagacctcggttcccggcagcagcgccgccaggcgcgccattaacaaggggttacgcgcgccgccgccgcacactaacaaacgctcgcagccgccgcttaacaatacctgctcactgatggtgacggcggtcaattccgcaagcgtagcctgaacatcctccccgcgtagccccggatagcgggccatatgctgctccagccagccgtaattgaaatattcccgaccggtgcttttcggcgccggcaaggcaaaccacggatcgctcagcatgtcctgcagcagcggcagcagcactttaccttcgctagcccattgggcgtccttgtcgtacggtttgcccttctggcgccagatccaggcgtccagcaacatatttcccggcccggtatcatagccgcgcaccggctgacctggcgccagcagcgacacattagcgatcccgccgatattgagcaccatacgtcgctcgacggggtgggccagcagcgcatgatgaaaagccggcaccagcggcgccccctgcccgcctagcgccatatcccggcgacgaaaatcccccactacggttatcccggtgtgggcggcgatctggttgttatcaccaatttgcagggtatgcggagcctctccctgcggttcatgccatacggtctgtccatggcagccgatggcgatgacgtcggtgggtttgagactttcctggcgcatcagcgccagtacggcatcggcaaacagccgtcccagacgggtgtccagacgacctagctgcgaaagggtcagcgactgcccctggcaaatcgccagaatctcttcttttatcgcgtgtggaatgggccaggtgagactagcctgctgcgccaccatgttttcagtaatggtggccaaaacgacatcgataccatccaggctggtaccagacataacgccaataaagcgacccgatctcatacgttttccttcattccatgacccttgtatgcccttcactccatcataaagtgtcggttaatgctatgttgtactaatactttttaacaatagagcgacaaatcagagaacatcgtaaagaaccggcgtttagttgaggttgaagcaccagtgtttattattttttgtatagtccagggagaacctatgcccgccgacgactaaatgccatataattaaccgtatggacgttcaattgaacaccttcggtgaacaggagattcataaatgattttacgtgttttggctgtatcgatgattggttttacgctcgcaggctgcgtgagcagcagcggcctgtccggcgacgtttattccgcatctgaagccaaacaggtgcagagcgtgacttacggtactatcgtgcatacgcgcgccgtacagatccagagcggcgacgatagcaatgccatcggggccattggcggtgcggtactgggcgggttccttggaaacaccatcggcggcggtaccggacgctctctggctacggcggcaggtgcggtcgcgggcggcgtagccggtcagggcgttcagggcgcgatgaataaaacgcagggcgttgaactggaaatccgtaaggacgatggcaataccattatggtagtgcagaaacagggcagcactccgttctccgttggtcagcgcgtggccattgccggcagcggcagccaggtcaccgtctctccgcgataatttcccttacgatgcggccggttgcgccgcatcgtatttttcagccacgtttatttcgccgtaataaattcgtagtaaccatcagacatctttattttaatattccatgaatcattgcgcctgcgcaatatcttaactgcccgcccctattaccctcaagaacgtaaattagccctggtgactcatcgtcgctgccgttgccttttatgtggaatattgcctatgcccgaacatgtgcatcatatcgttaaacgtctaatcctttatatttgcatttgtttactggccggggttggcatttccgggatgactgcgttttttcataccagcttcagtagtacttcctcaatattatttccgctgctgaccagtttcctgatggtttttcatattaccattgcctgttttatgggcatgaaatactggagcagcaagcggcgtctctaccttactccagtctctttcgggtttgcctgctcagcgctgctgatgcttggcacgctcagcagctatccggactggcttacctgcaatccggccccggtcgttaatcaaaatgacgccgttatctattatttcttccgcaatataatgatggctgtgttattcatgtcatctattattttgtactattttcgccagcgcatcatgcattcgtggaaagcacacgttcttacatttacagcatgtattctttttacgttgaccattattgttttatcatggctatactccagccattcgccgtggctgagcgtcaattttatcgacgatctaagccatacctttaccccgttgtggcaaagtattatcggctggctgctgatggcagtttggttcatcacgctgattttattaattagcttgagtaaactgcgtaatattttttggttcagcggcgcttttttttgcagcgcttatttgttcacgcttttccagctgctctccaccgcaggggagctggatcagacctggtaccaggcgcgttttttcgaaacgctatgcaccttgttcctgattctggtgctactggttgacgtctttatcctctatcgcgagtctaaccacaaatatgtccattcgtatcagaattcgatccgcgacccgttgacccgcctctacaaccgcagctttttctacgacacccttaaccaacagctggcgaaggtgaatgcccagcatccgctgtcggtgctcatcagcgacctcgaccatttcaaacgcatcaacgatagctacggccacgtcgcgggcgacaaagtgatccagttcgccgcctcggtgctggaaagccattcgcgggtagatgacgccgccgcacgcatcggcggtgaggaatttgctctgctgctggtcaacaccggtgaaaaagaagcgcaagcgatcgccgagcgtatccgcctggcggtcagtgccggggagagccatttaccggagcgaatgaccatcagcatgggggtgtataccacctacgacaatagcgtgacagcggaagcgtgcgttcagcgcgcggacgaagccatgtatgaagcaaagaataacggacgtaaccaggtgatcgtctggcatcagcagggagggtgaaaaaaggcccggattagcccgggccgcaaagaattaatctttagcctggagatcgaggatattttgttcaagtttacggattaagtggagcaaggtttccacttcctgcttcgagacccctgagaggatttcatcacgggtcttacctatcacctcttccatctcgttgatcagcggttcggctttttccgtcagcttgatgcgtttggcccgccgatcgcttgcgcaggtctggcgagaaatgagccctttctcctccagctgatcgagcgtgcgcaccagcgacggctgttcaataccgatagctttcgccagctggatctgcgactgctcaggcggcagctggtggatgttatgcagcgtgacccagtgggtctgcgttaactccagaggtttcaggcgatggtcgattagcgcgcgccaaacgcgaactaaacgtgccagatcagaaccaagtggcgattccaatttcatctccttataattagcttgctaagttattatactgattttagaatagtgtgcagcatttgaattatcaaaacaaatgaattacttgattcaacaaaaaccaaaacaatgatttacactgttaaagagtagcacgtcctgaggttacccctgtaatggcaaaggatttttgcttgtgaaactgagtcttaacacatccggattgccgctgcaggacctggtgttcggcgcatccgtctatttccctccgctgttcaaagccgtcttgttgggtttctttatctggttgtttttacatcgccagctgcgtgactggatgtatgcgggcgacatctggcacccgctactaatggatctctccctgttcgcgctctcggtctgtctggccctggtattactcattgcctggtgatctccctgttatgaaaagattaaaatatctgtcaacgctgctggtcgcggccgtcgccctgattgccgcatggttgttatggaatttctacactcagtcaccctggacccgcgacggcaaagtgcgcgccgagcaggttgggatcacccctcaggtctccggcagtattctgcagttgaacgtaaccgataaccaacgggtcaaagccggggaagtattgtttaccatcgacgacaccccctatcgcatcgcggtgctgaacgcccaggcgcagctggcgaaagcccaggcggaggtggcgaaagcgcaggcggagcaaagcaaggccgccagcgaggctcgccgtcgccgaagcctgtcgcaaaatgccatctcggctgaagaccttgagaacgtcaataccgccctgaataccgccaccaccaccctggctgccgccagagcgggggtcggcgtaaccgaagcggcgctgaaacatgcgcagtggcagctcagccagacggttgtcaaagcgccggtggatggctgggtgaccaacctttccacccgcgtcggtgattacgctaccaccggccatccggtctttgccctggtggacagccattcgttttacgtactgggctacttcgaagagaccaaactgcgccacattcgcatcggcgatccggcacaaattattctctatagcaatcagcagacgctaaagggccatgtcgccagcatcggccgcgcgattgtcgaccagagcgtggaacagggaaccgggctggtggccaacatcaaaccaaatatcccctgggttcgtctcgcccaacgcgttccggtgcgaattgcctttgatacgctgccggccgatgtcaccctggtctccggtaccacctgcactgtctcaattggcgggcagtaatgaacctgcagaccctgtcgtggcgcgcactcccctgggttaaagccacccggccgcagtggcggtacgcattgcgcaacggcatcgcgatgtgtcttgcgctgagtatcgcctatgcgctggatcttgatgagccctactgggcgatgacgtccgcggcggtggtcagctttcccaccgtcggcggcgtgatcagtaaaagttttggccgcatcgcaggcagcctgctcggcgcctgcgccgccctgctgcttgccggtcatacactcaacgatccctggctgtttctgttcagtatctccgactggctggcgctctgcacctgggcctgcgccctgttcaccaacaacgtcgcctacgcctttcagctggcgggctatacctgcgccatcatcgcctttccggtgattaacatcagcgacagctacgagctgtgggtcatcgcccagtcgcgcgtctgcgaagtcatcgtcgggatcttctgcggcgggctaatgatgatgatcctgccaagcacctccgacggcagcaacctgctgacggccctgaaaaccatgcacgcccggctgctggagcacgccagcctgctgtgggtgccggagacgacggatgccattcgcaccgcccatgagagcgtgattggccagatcctgaccatgaacctgctgcgtatccaggccttctggagccactaccgtttccgtcggcagaatcctctgctgaactacctcctgcatcagcagctcagaatgaccagcgtcatctccagtctgcgacggatgctgctgaactggcctgacgcgccggcgaacactcgccaggtactggagtcgctgctcgccgagctcgccacccctcatgccgacagctatcacgttgcgcggatcctggcgccgctggcgccgcggcaggatgccgattaccggcacatcgctttctgggcgcgattgcgctatttctgtcgcatttacctggagagcagccgctggatccgccgcgttgaaaatgcctcggcgatcgccgagttcaatgtgcccgccgccccgccgttagcccgccataccgatcaggcggaggcgttgctcaacggtgtccgtaccttttgcgcgctggtggcgattggcgcatgggggatcagtacccagtggaccagctgtgcggcggccctgaccctggcctccatctgctgcgtgctctactccgtatccgcctcgccgtttcgctcgctgacattgctgatgcagactctggtcctgctgtcgctattcagtttcgtggtgaagttcggcctgatggtgcaggtaaccgacctgtggcagtttctgctgttcctgttcccgctcctgaccaccatgcagttactcaaactgcagtggcccaaatacgccggcctgtggggacagcttatcgtctttatgggctcgtttatcgccgtcaccaacccgccggtgtacgattatgcggcctttttcaatgataatttgagcaagattgtcggggtaggctttgcctggctggcctttgcggtactgagtccgggctcggacgcccgcaaagggcgacgccatatcagagcgttacggcgtcactttgtcgatcagcttagccgtcatcctcagcacagtgagcatgaatttgaatcgctggtctatcaccacgtcagtcagctcagccagagtaaggatgccctggcgcgccgctggctgttgcgttggggcgtcgtgctgctcaattgctcgcacgtcgtctggcagcttcgcgaatgggaaacccgctccgatcctctcgcccaggtgcgcgacctgtgcatcaacctgttacgcgatgtgatgagcgagcgcggcgtgcagcagcgcccgctggcctccaccctgcaggagctgcagcggatctgcgacgccctgaaccaccatcatcagccggcggcgcgggaactggccgccgcgatttggcgactgtactgcgccctgtcgcagctggaacaggccccggtggccggcacaattggcgaaggaactacttaatcaccccgcaggcaaaccgttcgccgccgccgcccagcggctgcggactgtcggccatgttatccccgcctacgtggaccatcagcgctttccctttcacctccgccagcgttttcaggcgcggagcaataatcggctggtcggctacgcccgcatcgttgaccaccagcaggggcaggtcgccaagatgcccggcccccaacggcccttcgtgtttgccggtatgctgcggatcgtaatgtccgcccgccgccccggcggccacggctttaccttctttcatcgccggctggcagctgccttcggcatgaatatgaaacccgtgcttacccggcggtagcgcccgcagagtgggggcgaactcgagtccgcggtcggtttcggtgattttgacgctgccgatggtctgaccgacgccctgggtggtcacgagattaagttgcacatcttcactaacggcctgtgcgccagcgcaaaatgcgagggataagatcgcgagaatacatcgttgcataacacctccggatggctgtctccctgttaagtgtaaaccaggaacgcctttccggaggggaaatgcccgttacggtacgtcgtacccgagcgcggctttacggatgcggaaccactgctgacgggtcatgctgagtttttcagccacaatcgccgagcgcacgcgctcgattttgcccgagccaataatcggcagaggctgcgacggcagacgcagcacccaggcataaactacctgttcgatgctgtcggcgttaagctcgtgcgccacctgcgccagctcatcgcgcagcgcctggaagcactcttcgttaaacaggcgaccaccgccaagacaagaccacgccatcggacgaatacgcagttgctgcagctgatcgagagtaccgtcgagcagcagcggctgatgcaccggtgaaatttcgacctggttggtggccagggtaaacggcagacgtgactgcagcaaggtgaactgggcgggggtaaagttcgagacgccaaaatggcgcactttaccgctatgatgcagcgcgagaaaagcttcggctacctcgtcggcgtccatcagtgggtccggccggtggatcagcagcaagtcgagatggtccgtcgccagattacgcagcgattgctcggcgctgagcacgatgtgatcgcggtcggtaatgtagtggccaatggtgttctcagcgcgcgcccgggtggcgataccgcatttgctgacgatttccatccggctacgcagatgcggcgctcgcttcagcgcttcgccaaaggcagcctcacactgataatcgccatagatatcggcgtgatcgacggtggttacgcctaaatcgagatgctgctcaataaagctgaccagctcgccaggcgacattttccagtccatcagacgccagtagcccatcacaaaacgtgaaaattccggcccctggggagccatagcaatacgctgaaccataaccgcttcctcaataaaaaagtgctctgagtatacgtaatttttggcttaaaacagtgagggttgctgcggttcttccgccggctccggcctgttcgcgcgtattttgcgaagcagccgttggcggcaaagacgcaaaacctcctgtttctgcgcatcgctcatcgtttgccagttaaaacgttcctcacggctgcggaaacagccgcgacagtagccgcgctcatcggtctgacatattccccggcacgggctctgcaccgggaaaaattctaactgctctgccaccacacgcctcctgtcccctcgtctcctttcattgaagacgtttccccgcgccgacgcaaattttgttcactacgtgctgcgtcagctaacatttttccgccgacgcttgcattagaccaatcggtctactacagtgtgcagcatgaacagacacagcgattgcgatacccgagaacatatcctggccaccggcgagcagctttgcatgcatcgcggttttaccggaatgggcttgagcgaacttctgaagacggcggaggtgcccaagggctccttctaccactactttcgctctaaggaagccttcggcgtcgcgctgcttgaacatcactacaccggatatctgcagcgcctggtggaccacttcgatcatggcgacggtaactatcgcgatcgcctgctggcctactatcagcacacgctgaatcagttctgccagcaggggattattagcgggtgtcttactgtcaagctatccgcggaggtttgcgatctgtcggaagatatgcgcgccgccatggatcgcggagccagccagattatcgccctgctgggcgacgcgctggagaaaggacgtcaggaaggcagtctcgcatttgacggcgaggccatgaccctgtcgcaggtgctgtattccctgtggctcggggccaacctgcaggccaaaattacgcgtagcgcaacgccgctggaaagcgcccttgcccacgccaaacagattattgcggcgcctgcggtataacaggcgtttttatttcatcagttactagacgaccggtctactcaggagtcactatgtcggaagcaaaattattcagcccactgaaagtcggtgcggtcaccgtccctaatcgcgtatttatggcgccgttgacgcgtctgcgcagcattgagccgggcgatatccctactccgctgatgggcgaatactaccgccagcgcgccagttccgggctgatcatcaccgaagcgacgcagatctccgcgcaggccaaaggctacgccggcgcgcctgggctgcacagcccggagcagattgccgcctggcagaaaatcaccgccggcgttcatgccgaaaacggtcatatcgccgtccagctgtggcacaccgggcgtatttcccatagcagcctgcagcctggcggagccgccccggtagcgccttccgcgctgagcgcgggcacccgtacctcactgcgtgacgaaaacggccacgccattcgcgtcgacacctcaatgccccgcgccctggaaaccgcagagatcccagggatcgtcaacgatttccgtcaggcggtcggcaatgcccgtgacgccggcttcgatctggttgagctgcactcagcccacggctatctgctgcaccagttcctctcgccatcggcgaaccagcgtaccgatcagtacggcggcagcgtggagaaccgtgcccgtctggtgctggaagtggttgacgccgtgagtcaagagtggagcgccgagcgcattggcatccgcgtgtcgccgattggcagcttccagaatgtggataatggcccgaacgaagaagaagacgcgctgtatctgattagcgagctggcgaaacgcggtatcgcctatctgcacatgtccgagccggactgggcgggcggcaaaccttacagtgaagctttccgtcagaaagtccgcgaccgcttcccgggggtgatcattggcgctggcgcttacacagtagaaaaagccaacgatcttatcaataaagggctgattgatgccgtggcctttggccgcgattacatcgccaacccggatctggtggctcgcctgcagaaaaaagcgccgcttaacccgcaacgcccggaatccttctacggcggcggcgcggaaggctacaccgattacccgactctgtaatccctccattgatagcggcgacgtatcgccgctatactcaacgttctgatctatcaaataaactgcataggggacattatgcgcttactccacaccatgctgcgcgttggcgacctgcaacgttctatcgacttctataccaacgtgttgggcatgaagctgctgcgcaccagcgaaaacccggagtacaagtactccctcgcctttgtcggctacggcgaagagagcgaaaccgcggtaatcgaactgacctacaactggggcgtggacagctatgagctgggcaccgcctacggccatatcgcgctgagcgtcgataacgccgccgaagcctgcgaacggatccgtcagaacgggggcaacgtcacccgtgaagccgggccggtaaaaggcggcaccaccgtcatcgccttcgtggaagatccggacggttacaaaatcgagctcattgaagagaaagatgccggcaaaggtctgggcaactaacgcttccccacgctggcatatttaatgccatggctcgcccgggcgctacggcgcccgttgttttcacccctgcctgctgcaagccgcggcaaaatttgccataatgcgcgctacttttttccagctaagagaatctgatgtccgagaacgctcaactgaatggtctgtgcgaccgtttccgcggtttttatccggtggtgatcgatgttgaaaccgcaggatttaacgccaaaaccgacgccctgctggagatcgccgccattacgttgaagatggatgagcacggctggctgatgcccgatgaaacgctgcatttccatgttgaacctttcgagggcgccaatctgcagcccgaagcgctggcttttaacgggattaacccgcatgacccgcagcgcggggccgtcagcgaatacgatgccctgcatgccatcttcaaaatggtgcgcaaagggatgaaagagagcgactgcagccgggcaatcatggtggcgcacaatgccacctttgaccacagcttcaccatgaccgccgccgaacgcgcgggacttaaacgcaaccctttccatccgtttgttaccttcgacaccgccgcgctaagcgggctggcgctgggccagacggtgctgtcgaaagcctgtattgccgcgggtatgccgttcgacggcgcgcaggctcactccgccctgtatgataccgagcagacggcgcagctgttttgcgagatcgtgaaccgctggaagcgtctgggcggctggccgctgccagtggccaccccggagtgataaaaaaagcgacttccaggaagtcgcttttttactgatggcgggaattactccgcttttggctcgtcggtatggtactttgccgccgtctctttgatcagctgctgcagttcaccgcgctggtacatttcgatgacgatatcgcagccgcccaccagttcaccgtctacccacagctgcgggaaagtcggccagttggcgtatttaggcagctcggcgcggatatccgggttctgcaggatatcaacgtaagcaaaacgttcgccacaggcggacagcgcctgaacggcctgggcagagaaaccgcagcttggcagcttcggcgaccctttcatgtacaacaggatcgggttttcagcgatttggcgttggatcttttctaaagtcgagctcattgtcgtgcttccttaaacttctttctacggcagtaacttgtcattgtagcgtcctgtaggcaggacggataataacatttttttcactattcatattttatcttctgttgcgcgaagttgccttaaaaatatcattttgcggtcacaggcgggcgctcattgcgcattttctgtgcgaggcggtcaatgtctgacgcgttttcttgcaatcgttaaccaatcgacatttttgatacaaaagaatattaactttccggctttttatgctttagaatcattccggtttgtcattcatcgtcaggcatttgtacatgtctgtaattaatcaggggattgctcagtggcgcggctaaacaaaatcgcgatatcgctctgtgcattactgttcacgtctatctcattcacgccactggctcaggcatcagggcatacgcacgcctccgcttcgccaaaagcgttgcccgcgaaaagtggctcagagcgcaagaaaaaagcaaccagtcaaaaaactaaaaccaccgctaaaaccaccagtaaaaagtcctcgcgcacccggctccctacccgcactaccgcagcaagccaaaccgcacttcatcgtcaggccgccggcgcgacgaaaaaatgcgtgctgcgtaaaggttataaaaagcagtgcgcgaaaacggtcgccgccagcgccgagccgaccctggcgctaaacagcgtcaaaagcaagtgcgtggtgcgcaagggctataaaaaacgctgtaagcccgaggccagcgaagcgaatttaacgatcgccgacgcccacaaggtccgggtgcaaaaagcgcaaagtaccgcgatgaataaactgatgggccagttgggtaaaccctatcgctggggcggcacctcgccgcgcaccgggtttgactgcagcgggctggtctattacgcctataaggacctggtcaagatccacatcccgcgtacggccaacgaaatgtaccacctgcgcgatgcgcgtccggtggatcgtgatgaactgcagagcggcgatttagtcttcttccgcacccgcggacggggcgctgccgaccatgtcggcgtctacgtcggcaacggaaaattcattcagtcgccgcgcacaggtcgtgatattcaaatcacctccctgagcgaggattactgggttcgccattatgtcggcgctcgtcgcgtcatgacgccgaaaaccattcgctgatcccggtctgccgctgcggcggcagaccgcctctcctgctccatctccatccccacccgcaagggatattgcagattgctctctttgcccggcgtatcacgacgatagcgggtcggcgacatgccaaagtgacggtgaaaggtccggcagaaagcggcttgtccctcgtatcccaggcactgagaaatactctgtatcgacgcctgcgtctgcgttaaatagattgtcgcaatcgtcatctttcgtcggctgacgtagctcgccagcgtgcagcccgttaccatggcgaattgtcgctggaagtaccagtgtgagtagccggactttttcgcaatcgcgctcaccgacagggtgtcgaaaatatgtgcttcgatccagtcaacaatcccctgcaccaccgggatcattttcgcgctcaccacctcatctgtttttgccatcgtcgtcatcctggggaaattactgctggcggctatatttgtcatacaaattaaaaaatagacaatgaattattggcatagcgacgattgcctgagcgcatatttttattaatcgtttgatattaaagttttattttttgttcagcgcattgcgtgacagcggcgaagcagagtagttaattgccatgcgagttcgcaaatccgcagagggcatctccttatacagggttgcaacaattttggcggcttattgcccactcctgcagaaaacggttaagccttcaccacatgcaccggagataatagcctttatcgttgtaaggcttttcactgcttgcggcaaatgttaacattctcaatacaataacacgcccgggacgcgacagcgtcgggcggtcagaacacgattcaggtgaaaacctcatcctgtcaatgtgagataaaacaaaaagttataaggagagtagcaatgtcgtttgaattacctgcattaccatatgcaaaagacgccctggcgccgcacatttccgcagaaaccctggaatatcactacggtaaacaccaccaggcgtatgtcactaacctcaacaacctgatcaaaggcactgcgttcgaaggcaaatccctcgaagagatcgtccgcacgtctgaaggtggcgtattcaacaacgcagcgcaggtttggaatcacaccttctactggaactgcctggcgcctaacgccggcggcgaaccggaaggcgaactggcggccgcaatcgccaaatctttcggcagcttcgcggattttaaagccaaatttaccgatgccgcggcgaaaaacttcggcgctggctggacctggctggtcaaaaatgccgacggcagcctggctatcgtctccaccagcaacgccggcaccccgctgaccaccgacgcgaagccgctgctgaccgttgacgtttgggaacatgcctactacatcgactaccgcaacgcccgtccaagctacctggaccacttctgggcgctggttaactggaagtttgttgcggctaacctggcggcataaacgacaaaccgcagcggggtctccccggctgcggttttttttgcccttgcccagccgatgattactggctggcgaaagcctcttccggctgcgctcgcccgctaaaccagaccagcagcagcgccagaccagcgataatcgcgcccatcaccggcacaaacgcatatcccagtccgccagagatcaccgccccaccggcggcggcgcccagcgcgttgccgaggttgaacgcgccgatattcaccgaagaagagagccccggcgcctcatgcgctacgcgcataacccgcatctgcagcggcggaaccaccgcaaaggttgctgcgccccagacaatcatgctgatggccgccccggcctgggattgcgccagcagcgggatcgccagcatgatcgccatcagcagcagcagaaagcccttcagcgtgccggagaccgaccggtcagcgaatttgccgcccagatagttgcctagcgaaaaaccgacgccaatcagcaccagcatcgcggttataaacagcgatgaagcgtgggtcagcgtattgagcactggcgaaatgtaggtatacagcgtaaacatcgccccggcgcccagcacggtggtcagcaacgcggagagcacctgcgggcgcagcaggacagaaagctcttttttgacatcaggacgttcccccgcgctgcccttcggcagggagaaccacaggctaaccatcgccagcaggcctaatcccgcagtagcaaggaaggacatccgccaaccgatggtttcgccaagccaggtggccgccggcacgccgccaatgttggcgatggtcaggcccataaacatagtggctaccgcgctggcctgcttatgctttggcacgacgctggccgccaccaccgatcccaggccgaaaaaagcgccgtggttgaggctggtaataatccgcgacagcagcagcgtggtgtaatccggcgcgatggatgacaacaggttgccgacggtgaagatccccatcagaaaaatcagcgcattgcgccgtgcgcgatgcgacaacagcagcgtcatcagcggtgcgccgaccatgacgccgatggcatacgcactgatcagcattcccgctaccggtatcgagacgtccacacctttcgcaatcaccggcagcaatcccatcggggagaactcggtggtaccgatgccaaaggcgccgatcgccagcgcaagtaaaggaaagttgattttcattcaatgactccatcagaccgtcagataggacggcgtaacatcagaagtcaaaagcatgacatcaatcacaaaaaaacaaaagtgaacgaaatgacaaaagatttttgcagaattgataataatagcgggatatggggaggaagcggcgctcctccctcagcgaaacattagtgcagtatggcggtcaggctgaaagcgacaatcacgccgagagcaataatcgtggtgatcagcgaaaactttaaattggtatccatcatttttccctcttgttatccccacaccaaaagtgagcttgctcatttttgcacaaaaaatcgcaaaaatcttccgggatttagggcgatgcacatttttgctcttccactttgccccaagatcggacaaaatcccacgctaatttaaaagcgtatcggccattgaccccttcctgtcgttctgtgtcgttttcccgacgtgatgcaatgttgaaaattgtattcagggtgtgtgtaggcaaacgtttacgtatcgatgatcaggcgatcaggtcaaggcatggagtgagatgtaatggcaactattaaagatgtagcgaaacgcgcaaacgtttccactacaactgtgtcacatgtaattaacaaaacccgtttcgttgccgaagagacgcgtaatgcggtatgggcggcgatcaaagagctgcactactcgccgagcgccgtggcgcgcagcctgaaagtcaatcacaccaaatcgattggcctgctggcgaccagtagcgaagccgcctatttcgctgaaattattgagtccgttgaaaagagctgcttccagaagggctatactctgatcctcggtaacgcgtggaacgatctggaaaaacagcgcgcctatctgtcgatgatggcgcaaaagcgcgtagacggtctgctggtgatgtgttccgagtatccggattcggtattgagcatgctggaagagtaccgccatatcccgatggtggtgatggactggggcgaggcgaaagccgacttcaccgatgcggtgatcgataacgccttccagggcggctatatcgccggacgctacctgattgaacgcggccatcgcgaaatcggcgtgatcccgggcccgctggagcgcaacaccggcgcggggcgacttgccggcttcatgcaggcgatgaaagaggcgcatatcagcgtgccggaaaactggattgtgcagggcgacttcgagccggagtccggctaccgcgcaatgcagcagatcctaaaccagcagcaccgcccgacggcggtcttctgcggcggcgatatcatggcgatgggcgctatctgcgcggcggatgaaatgggactgcgggtgccgcaggacatttcgctgatcggttatgataatgtgcgcaacgcccgctatttcagcccggcgttaaccaccattcatcagccgaaagattccctgggcgaggccgcatttaacatgctgttggatcgtatcgtcaacaagcgtgaagagtcgcagtctatcgaagtgcaccctcgtctggttgagcgccgctcggtagcggatggcccgtttgtcgattatcgtcgttaaggcatctggcgggcgcggatctctccggcgcccgcagccactcccgattcagcgtgtcgctgtcccccagatagtcaagcatccagttcagcgccggtgaggcatcgttctgctgccacgtcaggcagcaggcggcatccgggaacggattttccagcgccagcgcagtccactcgccgcgatctatccatggacgggcgaaatggctcggcaccatgccgacgcagagtcctgccgacaaacaggttgctgatgattcccagtcagggacgactaccctcttctggttatccagcaaccatgttgtccgtttaggcaacgagcgcgaggtatcctcccgcaccagcgacggccagttacgcaggacgtcgtcgctcaggggtccctccatctttgccagcggatgatcgctcgccaccacgcagtcccagctcagcatccccatatcgcggaacgcatagcgaccgccgaccggaatagatcgcgttgcgccaatcgccagctcaacgcggccgtcggccagcgcatcccataccccattgaatacttcctgaaagacgatcagctcgacgtcgggaaaatggcgatagaaatcgacgatcatctgacgcatccgcgccggtttcacaatatcatccactgcgatcgacaactgtccgcgccagccgttcgcaatttgctgacactgctggcgggtgatctgcatttttttgataacagagcgcccttcctgtaaaaaccagaccccggcgggggtcaactccacatcacgatggcgacgctcaaataagggaacggcgagccactcttcgagctgacgcacggtatagctgaccgcggaaggcacccggtgaagctcctgcgcggccgcgctgaagctgccgttacgggcgacggcatcaaccacttccagagagtattcagaccacattttctgcctgcaaaatttttgaatgcatgtgacaaatattagcgtttcacaagccacaatgcactccctacactctgcggcatcgtacctgtacaccaactatgagaacgttatgtcacaacccgggaaaggatttttagtctggctggccggcctgagcgtgctgggctttctggccaccgatatgtacctgccggcgtttgccgccatgcagcaggatctcaacacctccgccgcctccatcagcgccagtctgagcctgttcctcgccggcttcgcgctgggccagctgttctggggaccgctgtcggaccgctatggacgtaaaccggtgctgctgagcggcctggcgattttcgcggccggctgtctggggatgctgtgggtgcacaacgccaccctgatgctggcgctgcgctttctgcaggcgattggcgtctgtgccgcggccgttacctggcaggcgatggtcgccgattactatcctgcccagcgcacgaaccgcatcttcgccaccattatgccgctggtaggactgtcgccggcgctggccccgctgctgggcagctggctgctggtgcacttcgagtggcaagccatcttcgccaccctgttcgccatcactctgctgctgatgctgcctgccctgcgcctgaaggcagccgcgaagtcagtagtagtgacgcagcaaaagatcacctttctcgcgctgctgcgctcccgggaatacagcggcaacgtcctgatctacgccgcctgttccgccagcttcttcgcctggcttaccggttcaccttttatcctgcatgaaatgggctatggcccaaccgctatcggcctgagctatattccgcagaccatcgcctttctggtgggaggctatggctgtcgcgcgctgctgcagaaatggtccggtcaacagatgctgccgtggctgctggtgatttttgccgtcagcgtagccgccacctggctggtgggcctgcaaacccatgcctcgctggtggcgttaatgatcccgttctgcatgatggcggtggtcaacggcgggatctaccccatcgtggttgctcaggcgctgaagccttttccgcaggcgaccggccgcgcggcggcgctgcaaaataccctgcagcttggcctgtgcttcctgaccagtctgctggtatccgcgctgatcgccacgccgctgctgaccaccaccagcgtaatgctggtttcgattggcttagccggaataggctatcgcctgcagcagacgccggagctgacaccccattcttcccacgcgtaatgcccgtcgccagggcccggaccagtcgttagcatgctaagaaatttttattgaaagccagtacttagcgtcctatactggatccgggttcacataaatagaaaatagttacagattaacggatgcaggatgcctccgtttcaccatggaaggcctttcggcaagggttatctcccttcctctgtttacgtcggatagcgacttcacggattatccgtgagatttctcacaaagccaaaaaagcgtctacgctgttttaaggttctgatcacttgggcgtgatggagaagctatgagttcatcgtgtatagaagaagtaagtgtaccaaatgatgactggtaccggattgcagctgaattattaggccgtgcgggaattgaaatcaatggctccgcgccgtccgacctgcgggttaaaaatcctctcttttttaaacgggttttgcaggaaggttcgctgggtttaggcgaaagctatatggacggctggtgggaatgcgagcgtctggatatattcttccacaaggtgttacgcgccgggttggaaaagcagctcccacaccatttcaaagacacactccgcatcgcaggcgctcgtctgtttaatctacaaagtaaaaaacgtgcttggattgtcggtaaagagcactacgacctcggcaacgatctcttcagccggatgcttgatccctatatgcaatattcctgcggttactggaaagaggcgcagagcctcgaggccgcccagcaggctaagctggatctcatctgccgcaaactggagctggagccaggcatgcgggtactggatattggctgtggatggggcggtctcgccgaatatatggcgcgaaattatcaggtcagcgtcgtgggtgtaaccatctccgccgagcaacaaaaaatggcccaggcacgctgcgccgatctcgatgtagagattcgtctccaggattatcgcgatctgcacgacagctttgaccgcatcgtctccgttggcatgtttgagcacgtggggccgaaaaattacgctacctactttgaggttgccgaccgtaatttgaaacccaacggccgctttttactgcacaccattggttccaaggtcaccgaccataacgttgacccgtggatcgataaatatatcttcccgaacggctgcctgccttccgtgcgtcacattgccgaagccagcgagaagcactttgtgatggaagactggcacaacttcggcgccgattatgacacgaccctgatggcctggtatgagcgtttcctcgccagctggccggaaattgccgataactattctgagcgtttcaaacgcatgtttacctattatctgaacgcctgcgccggcgccttccgcgcccgcgacattcagctctggcaggtggtgttctcgcgcggtattgaacatggactgcgcgtcgcccgttaaataacactcccccgcttatcggcgggggattttttttcaggcttcattgaccttagccgccatctctttcgcggccagcacgcgttcgaccgtatcgacaaccgcctgggtctgcggatcaatctcaatattgacgcgatagcccagttttttcgctcccagggtggtccgctgcagcgtctccggaataagatgtacgcagaaacgggtcgccgtcacctcacccaccgtcagactaatgccgtcaataccgatgaatcctttatagaggatgtatttcatcagcgttggatcctgcactttaaaccagatctgacggttattttcggaagtcagaatcttcacgatttccgcggtggtcataatgtggccggacattaaatgcccgccgatttcatcactaaatttcgccgctcgctcgacgttcacttcatcgccgacctgaatatcgccaagattggtaatccgcagcgtctctttcatcagatcgaagctgatgtgcgcgccgttgatttcggtcaccgtcaggcagcagccgttgttggctaccgaggcgccggtttccagcccctccagcatatgtgccggtaactcaaccacgtgagtgcgaaaattgggtttatcatcaatggagaccactttcgcggttccctgaacaataccagtaaacatgtttggctcctgttgaaaatcatgacggtatcattaccgctttcgctatcgggaacaataacaggagggcaaagcggttgccagcgcgcttcgtgcctcgactcttttttcactggcttaatagccaatcctcgctacaatagactggaaattcctcatttttatccccttgctgccagttacggcggcttttttagtctcaaaataacaacaattcgaaggtgttcacgtgcagaagtatttcgttgaagcgcgtcagttattagctctggctatacccgtcatccttgcgcaggtggcgcagacggcgatgggttttgtcgataccgtgatggcgggtggctacagcgccacggatatggccgccgtggccatcgggacctccatctggctgccggcgatcctcttcggccacggccttctgctggcgctgaccccggtggtggcgcagcttaacggatccgggcggcgagagcgtatcgcgccgcaggtgcgtcagggcttctggctggccggctttgtctcggtgctgatcatggtcgtgctgtggaacgccggatacatcatcagctccatgcataacatcgatccgctgttggcagagaaggcggttggctacctgcgcgcgctgctgtggggcgctccgggctatctgttcttccaggtcgcccgtaaccagtgtgaagggctggcaaaaaccaagcccgggatggtcatgggctttattggattactggtcaacattccggtgaactatatttttatctatggtcatttcggcatgcccgagctgggcggcgtcggctgcggtgtggcgacggcctccgtttactgggtgatgttcgccaccatgctgtggtgggtgcgccgggcgcgtacgatgcgcgatatccgctgcgtcgagcgcttcagcggccctgattttgccgtcctgttacggctggtgcagctggggctgcccattgctctggcgctgttctttgaagtcactctgtttgctgtcgtcgcgctgctggtctccccgctcgggatcattgacgtcgctggtcatcagatcgcgcttaatttcagctcgctgatgttcgttctgccgctgtcgctggcggcggcggtcaccattcgcgtcggcttccgccttggccagggctcaacgatcgatgcccaggtttcggcccgcaccggcgtgggcgtgggggtctgcctggcggtatttaccgctatctttaccgtcctgatgcgtaagcagattgcgctgctgtataacgataatcccgaggtggtgacgctggcctcgcacctgatgctgctggcggctatctatcagatctccgactctattcaggtgatcggcagcggcattctgcgcggctataaagatacgcggtctatctttttcattacctttaccgcgtactgggtgctgggtttgccgagcggctatctgctggcgctgaccgatatgattgtgccccgcatgggacctgccggtttctggtgcggatttatcatcggtctgacctccgccgccatcatgatgatgctgcggatgcgttttctgcagcgccagccttccagcatcatcttacagcgcgctgcgcgctaacttgtctaagcccgccgctccggcgggctttttcgttcttcgctataacggcgcgttgtacattccgttactccctgacaccaaagactcactgatagcctcccggcaggcgcttatagtgttgccaacagccccgcagtggggttactcaagaaaccaagtcgaggatttcagaatgaaaaaagtattagctctggtcgttgccgctgctatgggtctgtcatcagttgctttcgctgccgatgcggcaagcaccaccccgagtgcagcagccagccatactaccgttcaccataagaaacatcacaaagcggccgcgaaaccggcagccgagcagaaagcgcaggcggcgaagaaacaccacaaagccgctgcaaaaccggctgctgagcaaaaagcccaggcggcgaagaaacaccataaagccgctgctaaaccggcagtagcgcagaaagcgcaggcggcgaagaaacaccacaaaaccgctgcgaaaccggcagtcgcgcagaaagcgcaggctgcaaagaaacatcataaagcggcacaccacgcagctaaaccggcggttaaaccggcggcataatggtcagggcgttaaggtgataaaccggcgctgaacagcgccggtttttttcaggaggacatcatgctgcaacgctatcgcttcgaattgctgctgttactgctcatcgtctgcgcgctgtttaccctgcgcttgatgtttaaatagctggctgctgaacccatttacgggccggcggcgtatagtcgcgaaaaccggcgataatctcgtctgccgaggtagcgaacggcagcatctccgcgtagcgcgggtgcataaacccttcctgtaccatgttatcgaccatcgcctgaagcggatcgtaataacccttaatattcaggaacgcgcacggtttctcatggatccccagctgcgcccaggtccattgttcgaaaatctcctcgagcgtccccgccccgcccggcagggcaataaagccatccgccagcgccgccattttggttttccgctcgtgcatatcctcgaccacatgcagctccgtcaagccgcggtgggcaatttcccgctccaccaggccgcgcggcatcacgccgatcaccacgccaccggcctccagcgccgcatcggcgaccgcccccatcagaccaactttgccgccgccatagacaagcgccaacccctgctgcgccagcgtacgtccaaccagacgggcggtttcgaggtacagcggatgttcgccagctgaagaaccgcaaaaaataccaatcgatttcatcttcgttatgactccttctcttctggtggccgataatttaacacatcggcaacccttccgcgcaggtttggactggctgaaaaataagagccgtgatgctcgctggcgaagaaatatccttgtggttcagtaaaatatatccggaatgagtaaaagttccgcaatcgcatgcaatgtgcaagaaaagtgacgtttacctcttgccacatcccctccctgccgctaatatgcgtccccgttgtcaccacaacattgcgttcgtagctcagttggttagagcaccaccttgacatggtgggggtcgttggttcgagtccaatcgaacgcaccataatgcgtttatagctcagttggttagagcaccaccttgacatggtgggggtcgttggttcgagtccaattaaacgcaccataatgcgtctgtagctcagttggttagagcaccaccttgacatggtgggggtcgatggttcgagtccattcagacgcaccaatcatttttccttctgtaattcctgaattttatcacctgctccccgttggtattgctgacttaaaatgttgtgtattggcaaagcgttttccttgcatagtccatactagtccacatgagtgctaaggaagccaacccttttaatgagcatcaaaaatcgatcaacagaccacgccgtttaatttcttaatgataataattccattcatcataaatatatgcatatgcaaatcgatatatcagataccccaccaggaatcccacaactgaaagtaaaccccagagaaatttatattcatttactgagaaaaaaaagaaccagccagccagcgcgatacctgaagcacctaatcccatcccagcccctctgataacacgggaaagcaggatgagtaatgttcgttttatattcatagtccaccaaagaaatattcacatattttgttaaattctgctggattcttatcactgaccatacacgctgtttcgaaagattttacaatatcctcaacaagaaaatacagaagatccagatctcccagattttgcagtttatcatgcagtaccggatttctgcgcttcagatatcgggacgtgtatattgctctggatgtttcagctccaacggataataataatccggcaagacttcctgcaaaaaaagcggacactcctcttgaggcgttcccctcttcctcatcccgccccgcgtcaggtgctgcggcttctgtcctgccgccatatgggttaacagttgctgattcagcaggctgtcgatattgcgccctccggagaacaaccatccggtagcgtgactgccccggcggttgctttaccaaactggttgcatcgtttatcagcctgttcctcatcgcttcactccatcttttctggcgttaaaattcatcattacgtcctccattcgttacccttcgccaccccacccactggccacgctatcgcacccgcctgctttcgcgaacgctaccgcccgtcgctgtctccctacaggaacccaaagcgcactgggtaaggcagtacggtgatcttctatttaacgcccggaatagcagtcgctcagcaatacatgcacaagaaaatcccgttcgtatccgcgtactgccggagtatattcagtttgaattcagcggaatctcggttcagctcgggagtgactgcgtaatactgacaaagacgataagcagaataaaacaaataaactgacaatattttgtaagacgagagatggaggccgtctggacgctgggcggaagcggtggcttcgcaacaacaatattccatactgaaaactattccctggcgtaaaaaagcgagcgcgcggtaaaacagggaggaaaccatgggcggcgctaaatgtctcccggccagctctgacttaacctgccgcaatctccgtctgcagccagcgctcaaacatctgcagcgctggctccccctccccgccgccgggtttgatcaagcagaagcgcttagccagcgtcggggagcccggccacggggcggccagcgttccggcgcgcagctcgctttccacatacatcttcggcaccagggccactccctgctgacttagtaccgcggcgatcgccatctcatgcagatcgtagcgcggcccctgggcggggttatccagcgccagaccgcactcacgggcatagtgcagccaggcgtccgggttttgccgccggtgaatgcgcgttagccggttaagcagccccggaagatcgtcatccgtcagcagcgcagcatggcagaccggcagcaaatactccgcaaataaaaacgtcacctccattccggtccacgccgggtgttcaaaatggatggcagcatcaaatccgcttcccggcagaatgaagggatcgctgcgggcggcgatattgaccacgatatgcggatgctgcgccgcaaagcgcccgagccggggaattaaccagcggctggcgaaggtggggagcacggcgatctccaggctgcggccatcgacgggcatcccgctgacgtcatgggtgtcccgttccagacgagcgaggatctcgcggacctgacgagcgtagcgggcgcctgccggattgagccgcacccggctccccgtcctgtcgaagagtttactgtcgaggagcgcttccagacgggcaatctgccggctgatggccccttccgttaacgcgagctccgccgccgcgcgggcaaagttgccgtgacgagccgcggcctcaaaagccagtagcgcagcgctgctggggattttacgacgcatagccaatgctccttgtgcaggctcaccgaaagtcagtgacagaatatcactacgccttgaattaacatcgtttttcagcgccatttttagccgataggatgatgaaaactcactaaagcgccttgtgcgccacatcatctgttcatcgaggtcactatgctctatgtcgtcgaatgcgcctacaccgatccccaaagcgaagcggcgtggaataccttttacaatcaggaaaaactaccggcgctggtctctgtgcccggtttctacgcctcccagcgcttccgcgctctcagcgagggctgcccctgctacctggcgctgcacgatatccacgatgctaccgtcatcgacagcgacgcctaccgccgcaacggcggcggccattttgcccgctggcaatcggcgatcgccgactggcatcgccacctctttctaacgaataatacgctgcgggaggttgccccggatgaagtgctgctgctgggcgataccgcggaggacttgcccgtcgctgcgccgatactcctgcagccaggcggcctggcgaccgaacaaacccggtatgccgccatcctcccacgagacaacctgcatcacctggccacgactgccgccgtctttatctatcagcccatcaccgcccggttacgcaacccggcgcagcgcgcgtgaggtcgccatgtcacctgctcccttttatacgttgaccgctggcgacctgacggtgactgccgtgagtgatggtctgatgtcagcgccgctgtccttactctcgggtatctcacgggaggaggcggaacatctgcagcggcattcaggattagcctcgccggagaccattgcgattggcgcctatctgatccgcggtcgcgggaatacggtgctggtggataccggcaccggcggagccaatggcgttggcggcgaacttatcgccaatctggcgcggctcggcgttggtcctgaggagatcgacgccatccttctcacccacgcccatccggaccatatcggcggcctgctgtccgccgctggtacgccagcgtatcccaacgccacggtgttcctgcctacgcgggaaagcgcttactggctggcaacatccacgttcgacaacgccagcgatcgcggccggcgcaacgtgctgcttgttcgccgtgtactggcgaactgcgcggcgcaaatcagcggggttgatgatgaggaagtgatcgccgggatccgcccgtgccctctgcccggccatacgcccgggcataccgggtatcgtctcgaagcgggcgatacctcgctgctgatctggggggatatcgtccatttcccgtccattcagtctgcgcggccagaagcctcggtcgccttcgacgtcgatcctgaacaggcccggcgtaccagggagatcctgctgcgccaggccgccagcgaacggtggttgattgccggtatgcatcttggcctgccgggattcgccagagtggagaacaccgcctcaggctattgtctgcgctcggtgtgatcgttgagcagaacaatgaccccagtaaaacccgggtcgcggcatgagcacgaccggggcgttttgtccgggaaagtggacgagccgttaaccgcggctcttccagccttttttacttttgcagctagctttggtggcgacccacgggtgacgtagctgagtcaactgaagatcctgggaggccgggctggccgaccagcgtttgttgcacagaggcttacgagttgcaatgaccataaaaacgctcctaaaaaaaatgaaccattccctgggtagttccacaagttcagaattagcgtatcaccgcgtaacggaagttatttcaatctttgttttagaatgtaaatggtcatcgccctctgaaatagcttaaattgatccaaatcaatttaagtgcatttatttttcgatgccacctatattttcaaccgcttaccttcgccagtcgcctgattaagacttttcctataccgcataatacaacagaatcaagcgatattatcagatttttattctagttatgtatggatgtgtggttatttgttttgattattctaactgataaaattcacttggtcagtcagcagcgggcaggtactctgcaccggcaagaagaggatttgtcagggagttgtggatgactaaaggctataaactacttggctataagttagcggataatattttctactgcctgcatcatcgggaaattatcacgctgcgcgggacacggacgcaagtccagctacgcagcaccatggcctgtttactggagtacctgctggcgcacggcagagaacgtctggtcagcgatgaagagttaatgattaacgtttgggaaaaaaataatctccgcccttccgcgcagcgcctatggcaggttattcagagcttaaagtctcgcttacaccaggctggcgtggagagcgcgttaatcatccgcgttaagtgcgcggggtattatattaataacgtttacgtagccgaaatttattcatacaaaccgccggggatgatgaattatataaacacttcgcctgctgatatgaataagcttctggtacgcagctaatcccctccccgcgccgtttacatcgccagcaacagggtttattcgttgaatattttaattcacagcaataatatttattttaatatcggtatcgcccagtgttttcgggatattcagaaaacagtgcccgaattaaaggttattcactccctgcccctcagccatcttccagaactgtccgggctggatgtgattattttgtcactggaaaactatcatgattacctggctgccgctgaaatcgctcagcactttcagggcctggtcattggctttacgtcagccggcaacgtaaggcgcggacgcccctttttcgcggataccctactgtgggtcagccagcgcgaagcggtacgtgaagtgaaccgccttctgcgctgcctggccgagcgccgctggccactcgtgccgcgtcaccaacgtcagagcgtttctttccgtcaacgagccccgctcaaccgcctggagatgcggatgattgatgccaccatgaagggtcagtcggttcatcaaatggccgctacgctggggattaatcgcaagcgggtctataacggcctggaaaggattaaagtgaatttccgcctggtcagtcatagccattttcatcatttcatgaccgacaggctctcttttagtcgcctgtctgccgacctccgatgcctgaccacagcggctaatgcaaccctgccgccgcgcgcagcctcgcgaccggcggaaaatcattcatattatttgaaagagtttcgcaaattgttttgattttaggctccagcaatcaagcgtattctttatcacatcagggcaacaggccctttatcagacaccaaattaaggaatacgaccatgaaattcatcaaaaatttcgttgctgttgctgcgctgtctctgttctctgctgccagctttgctcagagcgtcagcgccactgcctccacgctggaccgcgcggaagctaaaattgccgcccaggccgcagaacagggtgcatcctataaaattaccagcgcccagtttaacaaccgtgttcatatgacggctgaactgagcaaataaacccttgcccctaaacgtttcctaaagcgccgcctggacggcgctttagtttttccccttcctgacctttcccggcaggtccatgcggcattcgccggatcccggacaatactgactctcagcacaaaaaaagcctgatagcaataaatacccgattggctggattatctgcggcttgtcggcgtaaagcggagtggtctgtcgccgcgaatcagtcggaggccttccgctatctgcaaagcggcgcccattttggcaaaatttgcgtggcgtggtgagggtttgcagggcctccgtgccctggaaagactttattcgaaaaagacgtccggattttccgacagcgaaacaaaggatttcgtgtttttatccagcgcctgaatatcgccggtttcgatgtcgtagaaccagccatgcaggcgcagggtatggtcgcgcagaccaaccgccaccgaaggatgggtcttgatgttattcagttgggcgataacgttttcctgcaccatgccgttgaccttatcggtttcgctagcccaggttttcttttccaccaccgctttcgcggcatcggcatagcgtagccagtgagacaccgccggcatcggctcaaggcactgacaggtggcgatcgctttcatcgcgccgcagttggaatggccgcagatcacgatatccgtcacgcccagcgcaaccacggcatattcgatagtcgcggaaacgccgcccggctccggcccgaaagacggcacgatattcccggcattacgaatgacaaagagctgtcccggctcctgctgggtaaccagttccggcaccagacggctgtcagaacaggagatgaacagcgctttgggattctggctggaggccaggctgcggaagagttctttacgctgggggaagatctctttctggaagttgaggaagccctcaatgatatgttgcatagcagtgtctcttctctgtagttattacggtatgacaaagatcacagttattcagtttaccatcgatgacaagaatgggaatcgttattcaaacagttgcgcagaaaacgcgcgccgccaacgcctgcttctccccgtctaatacacacctttttgacgtgctttcctgaaccagtttgctactctgtctgctccaaccgtccacacgttaccgaccgcctgcctgcggcggacataacaggagtcgctatgttcctatccagcctgatggccattgccgcggtgctgatcatgggcgtgatcagtcccggcccaagctttatctttgtcgcgcgcaatgccgtcgctcgctcgcgtctgcacggtatggttaccgccctcggtaccggcgccggtgcggccattttctccattatggcgatgctgggcctgcagaaggtgctcaccgcggtgccggagctgtttattggtttgaaggtggcgggcgggctctatctgctgtggctgggctataaaatttttcgcgggtcggcgcagccgatggatttttccgccagcgggatggccggcaaccgctctttgctgaagaccttccgcgacgggctgtatactcagctcagcaatcccaaaacggcgctggtgttcgcctcaatttttaccgccctgctgccggcgcagatccccaccgccttctattacatcgtgccgctgatgagctttctgatcgacgtcagctggtattcgctggtggcgctggtgctgtctgccgaccgcccgcggcgcgtctacctgcggctgaagcggcggatcgacatcgccaccgcgacggtgctgggggcgctgggcctgcggcttatcgccacctccctcacccgctagcgggttacacggtatagatgcgaatatcgtgctgctgaaaggcaacgcgatattcgcgactgatattctcttccaccaccagcacatcgatatcgctgctggcggccaccacaaaccgcgctgctgccggaattttatccgaagtcagaccaacaataatctcgctgcactgtttaatgaccgctttcttgaactcgcagtcggcatagtcaaagccggtcaggcccgactctggcgccatcgcgcagccgccgataaacccctggtcgaataacatgccctgcacctgagccaccgccgcggcgccgacgcaaccgccgctcgctcgctgtacctggccgccaaggatcaccacgtcatacagcggttttttcaccagtaccgcggcgatctccggcgagttcgttaccaccgtcagcgccagctcggtgggcagcgcctcggccatcgccagattggtggtcccggtatcaatgaaaatagtgccgccgggcttcaccagccgggcacactgttgcgcgatcctgagctttatcgcgcggtttttatctttccgctcactgtaatcccccgcttccggcagactcagcaccgccccgccatacacctttttacagaatccctcgcggctgagctcatgcagatcgcggcggatggtatgctccgacacctgaagacgcgccgccagctccgcgcacaccactctgccgttttcctgcaggatctggcaaatcagcgcttgtcgctgttgagggaaagcagcataatcgagcataacacaatccttaaatgatcaaaaccgagcagtagcaagcatgatcgtctgccctgctctggttgtcaacgttcctgcccggaggtttaccatgaaaattgcccatttcgccctgtggacccaacagctcgacgtccaggcccgcttctgggtggacttctttgccgccagcatcaatgaaaaataccttagccagaccaaccccggctttgcctcctattttgttactatcgacgacgaggtggtgatcgagctgatgaccaagcctggcctgcagcaggccagcgcggataataaccataccggctgggcgcatctggccctctcggtgggcggggcggaacaggtcgatgccatcgcccaacgcgccggggccgccggaatactgatttcgccgccgcgcaccaccggcgacggctattatgaggcggtgatcgccgatcccgatggcaacctgatcgaaatcgtcgcatagtcagcagaacgccagtattcaggaggcatccatggcacattaccggattatcgacaccgcatcctggccccgccgggaccatttcactttttaccgccaattcgccaaccccagctttaatctctgcgtgccgatagcggcgcagcgcctgtacgaatgtgcgaaggaccgtcgggtctcgttttttcagctcgcgctctatgccctgctgcgcgcggccaacggggtaccgcagctacgccagcgagtgcggaacgatgaggtgattgaatatgacagtctggcagtaatgacgccggtgatgaccgtcggagagggattccgtcaggtgtggtgcgacaatgcccccgagttcaccgccttcagcgccgcggccacgccgaagattgtcgcggcaagagagacatccccggcgccgctcatcgtcgatggcgagcattttatctgcgccagctgtctgccatggctccacttcacctcgatgacccatgcggaatatgccgtcggcgcggcggtccccgcgctcacctggggaaaattgcagaatggcgttatcccggtggccgggcggtttaaccatgccttcgtcgatggtctccacgccagccgcttttatgcccttgtcgaagagggatttaatgaccccgagcggctctggttgccgctaaccgaaaccgcaccctccctgcttcccccagcggcgaaggagcgttaacgtctgcccggaactgaccgccagggagccttactccctacacggtggtcggtacggggccactatcatcgttccctttcagccggcgaataccgcgcaggtgtgacgcctgttcagaacctcgcgattgaaaagctgggtcacagacagcatgctgaccaaccatcatcagacagcggaaaccactgcttcatagccataaaatgggattatattgccgatcctttgctaaggataattagttataaatcatagcgtttcagtgttagacagggcgaagtgcgcctcttatctttcgtcatgaattgtaaataaccacgcaatcatttgatgaggtagcacttttgtccagattacaacaaggattaaaaaccagacaaacccgcttcgccctggcgctaaaagtggccctgctcggcggcgtggtagcattttcttctgctgtctttgctgagggtctcctgaaagaaggtatcaccccggccactgacgccagccagatcccggccagcgccaaactgcgcacagacacggtggtggccgggatctcagagccgcaagggatctttaacccctactttttcgtcaacggctgggatgagaacgtgactaacgtcattttttcacgcctgatcgactgggacagccagggcaagctggtcccgggactggcggagagctggacggtcagcccggataacaaagtctataccatcaaattgcgccctggcctcacctttagcgacggctcaccgctgacggcggaagatgtcgcctttaccctgacggtcctgctcgaccccagctatgatggcgataccgacatcaccctggccaatatcgccggcggggcggactacaaagccggcaaggctgacagcgtcagcggcctgaaggtcatcgacccgctcaccctgcaggtgaccaccacgcagccaggcgccaccacgctggccaaaattggcgggcctgtactgtcgaaagcctggtacggcaaagggtatcagcgggggaatctcgactatctacgctcactgcacggcaagccgctgggcaacggcccttacgtgtacgacaaatatattcccggtcaggaaatacgcttccatgccaatagccatttttaccgtgggacgccgccaacgccgcgctttatctatcgcgtgaccaatccgtccaccaacttccagctgttccagaccggggagaccgactacgacgcctttacctcgcgccccgacgatattgagcaactgaagatgctcggcttcgccaatattaatctttacggctccagcgactacagccaggtggaattcaacgtgcatcgcccggcgctgcaggataagcgggtgcgccaggcgctgatttacggcctggataggcagaagctgatcgacgtggtctatcagggatacggcaaagtcgccatcgaaccgatcgcgccgatctcctgggcctttaacgctgaaggcgtcaacccttacccttacgatccggcccaggccaaaaagctgctggatgaggccggctggaaaccaggcgccgacggtatccgcgccaaagacggccagcgcctggagctgaccctgctggtgagcaagaaggtgctcaacgatgcgctgatccccatcgccaaggagaactggcggcagatcggcgtgctgctgaagccgcaggtggtggatttcaacgccctgatggcgcagcgcaaagccggaaattacgatttggcctcgttcagcaccagcaccctcaacgacccgcacgacggggtatgggatttctacagcagcgaagctaaagagtccggctaccataacgcggaagtcgataagctgattaacgccggcaacgcggtgctcgacatcgaacagcgcaagccgatctaccaccagctgtataaagtgctggccgacgatccgccggtgatcctgctcggctatcgcgagatcctttccgccagcagcgcccgcgtcagcggctttaagccggatatctacaacggcctgaccggcagcctgccggatgtaaaaatcgtcaaataaatccctggccgccgggttaaccggcggctgatgtgagaccgtcatgagaaatttcatcctgaggcgcctgctgcaaacgctgccgatgctgctgctggcctccttcattatttttttgctgtttgccaaaacccccggcgactttatcgatggcaatatcaccctgaccgctgcccgcgccgcggagctaaaggcgatctacggcctcgaccagccgctattgacccgctacctccactggctgggacagttgctgcgcggtgatttaggcttttcgcttcagtatcagatcccggtcagccagttgctcaaccagtacatctggaactcttttctgctggccagcgtcgcgctggtcttttactggggcatcggcctggcggtcggcgtggtttctgccctgcgacccggctcctggtttgatcatctggtgagcgtcgcggtgtttgccgccatgtcgttccccacctttttcctctgcctgctgctgattaaatggttcgccgtcgatctccactggctgccggtaggcgggatgaccaataccggcagcgacgagagcggctggcagtatgtgctgcaggtggctgcccatctggcgctgccggtgctggcgctggtgatgctgcaggcgggcagcctgacgcgctatgtgcgcgccagtatgctcgacgtggtgaaaatggattttatccgtaccgcccgtgccaaggggttgcaggagcgcacggtgatcctcaaacatgccctgcgcaacgccctgctgccgattatcaccctgctgggcttcgagctgccggggctattctccggggcgatcattaccgaaaaggtattcaactggccgggggcgggccacattcatatcgactcgctggccgcccgcgactatccggtactgatggggtttaccctgtttctggcggtgctgacgatcgtcgggaatctgctcgccgacgtgctgtacgcctgggccgatccgcgtattcgggtgaggtcatgatgatcctgtcttacttagcttcccgtcgccgccagcggcaggcggctatcccggcgctggcgcacattaccccctctccctggcgccaggggtggcgacagctgcgccgtaaccggctggccatgttctgcttgatcctgctggcggtgatggcggtgtggtgcgtgctggggcccgtctggtcgccgtggagtgatgatgccaccgacgccctgagcatcaaccagccgcccggggcggaacactggctggggaccgatttcctcggtcgcgatgtctacacccgcctgctgctggccgggcgcatctcgctgattatcggcctgctgaccatggtgatgtcggtgtgcctcggctacctgctcggcgccctctcgggttacgtcggcgggttaaccgacaaactgatcatgcgcgtggccgacctggtgatgactatccccgggttaccgctattgatcgtcgccggggcgatgctttctgagctcgatttttcgccggactcgcgcatttatatggtggtggtgatgctcagcctgctggagtggccccgactggcgcggctggtgcgcgggcaatgtctctccctgcgcgaacgcgattttatgctggccacccaggtgctgggactgtcggcgcgtcgccggctgtttggccacctgctgccgaataccattccgattctggtggtgatggcgaccatggccgtcgccaacgccattctcagtgaatccgcgctgagctatctcggcctcggcgtggtgccgccgacgccgtcgtggggcaatatgatggatgccgctaacagtctgatcgatttccagcgtcgcccctggctgtggatgccgccgggcatcgccatctttatcaccgtgatcgccatcaacgtgctgggcgatggcctgcgcgatgccatggatcccaatatgaaaccgaggctgaaatgaccacgccgttagtctcctttgatcatctttccgtctctttcgccggcgaacgctctcgcgtgcgcgcggtgcaggaggtctctttcaccattcaggccgggcaaaccgttggcgtggtgggtgaatccggctgcggcaaaagcgtcaccgccatggcgctgatgggcctcctgccgccgcagacggcgcgcatcgacggcggcgagatccgcttcgcggaccgcgatctgctgcggctgaaagccagacagatggccgatctgcgcggtcaccagctggcaatgatttttcaggaaccgatgtcggccctcaacccggtgttgaccatcggggagcagctatgcgaaccgccgatccgccacctcggcgccacgccgaaagccgcctggcatcaggccatccagctgttaagcgaggtcggcctggcgcgcggggacagcctgatgacccgctatcctcaccagctttccggcggcatgctgcagcgggtgatgatcgccatggcgctgagctgtcggcccaaactgctgatcgccgacgaacccaccaccgctctcgacgtgaccgtgcagacgcagatcctacgcttgctgcgggatcgggcccgggccagccagatggcgatgatgctgattacccacgacctgggggtgatcgcgcagatggccgagcaggtggtggtgatgtatgccggacgaattgtggaacaaggcgccaccgcggaagtgctacggcatcctcagcatccctacacgcgggggctgatcgcctcccgaccggtgcccggtgagcggcgtcggcggctgtactcaattcccggccaggtgccggatctggccgccctgccggcgggctgcgcctttgccgggcgctgcgagcgggcgacggcgcgctgccgggaggcgattccgccgctgctcggcgaccgccaacgtgctgcctgcttttatagcgaatttgcggaggtgacagcatgagcgaacgctatgtcattgaagtggatggattgaaaaaatattttccgctgcgcgacggcctgtttggtcagcagaccggcgagcttcgcgcggtggacggcgtcagctttaatatccgtccgggcaccatttttggcctggtgggcgagtccggcagcggtaaaaccaccgtcggccggaccctgcttggcctgtacgagaagagcgccggcagcgtgaaatttcacggtcaggagctggccgacctgaccgcgcctgccctgcgcgctatccggcccaggatgcagctggtgtttcaggacccctatagctcgctgaacccgcggctgcgtattggcgaagcgattggcgaagccatgctggagcacaaactgtgcgcccgcaatgagctatatgaccgggtaatcgacgtgatgaagatctgcggcctggcgccggaacactatgcccgcttcccgcatcagttttccggcggccagcgtcagcggatcggtattgcccgggcgctgatcctcaacccggattttatcgtcgccgatgaacccatctcggcccttgatgtgtcgattcaggcgcagatcatcaatttgttttccgacctgcgcgacaaccgcggcgtcacgtttctgtttatctcccacgacctcggggtggtggagcatttatgtgacgatgtggcggtgatgtatctcgggcaactggtggaaagcgccagccgcgatgcgctgttcagccgccccctccatccctatacccgcgccctgatggctgcggtgccgaccctcgacccgcacagcgaaccgcaggcgctggtgcaaggcgagatcccggatccggccaatcccccgccggctgccgcttttcatcccgctgcccgctggccagcgaacgttgccgcagagagcctccggcgctgcgcgaggtggccccgggccatcgggtcgcctgtcattgggtcgcatcctgagcgcggtcaatggggttatttatttctaaacaaccgaccgattgtgcgcggcagcgccaggatttactatccgccccgtcttgtgagacgcgcgataaatgaagcggaacatctttgtactcttttgcccaatggcttcgggcattttttctccacgcccgggagcgatcctcccggcaagatatttagcggggcgcggtcgcccgtctgtcaaaacgcagcaatggaattgctcgtccgcgtcccgctacccttttcccgccgctaattaaataagggcaaaaaaataagacaacatgagattgcctggggtatagctttatcttatttttttaagcgtgtactccctgttaaggtatcaacatcatgcttaagcgtcgcactctcaaaacagcactggcggcggttatttcccttgccgtcatggccgcgccagcgtatgccaacccgggtaatggcaatggcaacggcggtggtaatcacgggaacagtggtaaccatggcaatagcggcaatcatggtaacaacggtaacagtggcgaccatggcaataaagggcaaaataaaggccagtccactgaagatcacggcaaacggaaaaactacggcaagcccgaccacgtcgacagcgatattagcttctcacgggcgcgctcccttgccgtgaactacggtctggtcggctatcaggcgctgccgccgggtatcgccaaaaatgtcgctcgcggcaaaccgctccctccggggatcgccaaaaagaccctgccagcttctatgattaacgacctgccctattatccgggctatgaatggcgcgcggtcggcgatgatctggtgctggtggccctgagcaccgcgatcgtcaccgccgtgattaacggtgtgtttgactaaatcacctgcttattgaaaagcctcgcctcggcgaggcttttttgtgcctgatgccggtgagtgacggctcaccggcataaccagtatgataacgattcaaccaacccgggaccgactatggacaaagacacagtagtaacgctgttgaaatacaagcgctggattgaccttgccaccttacaggcgatccgcgcgattgacggaacggtacatggcgaaaagcgtcacctgaccatcaggctgatgaaccatatccatgtcgttgatatgattttccgggcgaacctgcgcggcaggccgcacggctacaccgcgctgaatacccctgagacgccaaccgttgatgagctggaaacggccatgaccgcctgtacggacgaatacattcagtacgtcagcgccatgacccccgccgatttccacgaacgtatcgccttcaaatttgtcgacggcggcgacggctatatgaccgcgatggagatgctgaaccacatgctctttcacggcgcctatcaccgcggcgcggtgggctggatgattggcgaatgcggcggcgtgccgccgaaagaggtgctgaccgttttcctgcgcgaccatcattcctgaccgagcgaaaccattcgccgtcgattacgcggagaatcagcaggagctctgcctgatgtcgagtatgggttttctggtacagggcgctaaggtgggttccgatcgtggcgatagatacgcccagatgtaaggcgtcataccccgcaccagcagctccgccactgcgttttcggcgggcttgacgttaaacaactccatcaaggcgctgccggtgagaaacgccagtttctgcagcgccgatttccacaaatcaggatccagggtggccatcagcaccgtttccagaatctcgatataaatccggtccgtatcactcgccataccgccgcctgtcagtcacagtttccgttgccggagcggcgcatatggccgccctaatcagcataattccgtcagcgaaacaataacagttccggttcgctgagcagaccgggaagcgtgacgccaccgcgctatcaagggggttcaggatccactgtcgcgggtttggatagcgccccccttccggcatagcgtcagccagatcatcagggcgcacagcagggtgacgaccgccagcccgctaaacagtagcgtataagcagagtcatagctctcgcgcagcacccggagggaaaaatcaggcaaaagcgcagccgcctgcggcatattgccggcccccagccagcctgcggcgcggtgaatcacctcgggggcatacccgtgaacgcgactctgcagggtcagggtattgcttgccgttaataccgcggagacgaccgccagggcgatcccctcgccggcaacgcgtacggtgttgaacaggcctgccgccataccggctttggcgaccggcacagcggatatcgccaggccatccatcagtccccagggaagcgccgcccccgccccacagaggatcagcgccagcaccagttgcgggaggtggttactgtgaaaagcatcgcccagcaacaacaacccgacggaggccatcatcagtcccgccgtggacacctgccccggtgaaaaccagcgggtgagcagggccgcaacggatgggaaaaccagcatcggcgtggtcagcgccatcagatacagtgcgctctgcgactcactcatcccctctccgcccataaaatgcagtggaacaataatcagtaggaccacgtagcaacagcaggtggcgacaggcaacaacagtacgccgacaaaacgcggatgacgcagcagggagagttccagcaccgggttgttcaccctccggcagcgtacgacaaacgccacgaacagcccccccgacgcgatgagcaaggccagcgtggtcagggataaaaaaccgcgggccggaatgaccataagcgatgcagtaaacagcatcagggccagcgtaaacagggttaagcccaggttgtcgggtgtccgcggctcgcttttttctgtcgcaggcagagataccaggcctataagcagaacccctgccgagagcagcgcaaacagggcgtatacgccgcgccagcccaccgcgtcgatcatgaagccgatcagcagcggaccgaacgccaggccaatgccgaacaccgtgccgaggatgctgaatgcccgcgtccgctgggcgccatcatacagctgggccagcgccgcactgccgctggctaaaatcatcgccgcggccaggccctgcagcgccctcaacacgcctgacaggaagagattgtgcgtcagacaaaacagcaggctgctcaggcacaacagcgcggcgccggcgataaaaatacgttttctgtcgatggcatccgccgtcacccctgcggccagcaaaaagctgccgaaagtcagcataaagccattggtcagccacgacagcgcagcgggagagccgcccagcgactgctgtatcgcgggggtggtcatgacaccgccggtaaaacttaacggcagcagcaaggccgccataaagacagaaagcgcggccagggcgctggcgtatcgggaaggtgttctggcggggagtaacatcgggcggccctcatcagtcggcaagaaagaataaactgtcgccatcctattgcggatgttcttgccgataaatagactgaaaatatcttcttaagagacataaggtttataatcgatggacagcctcacctcgctgacgtcctttgtccgcaccgccgaaacgctaagctttgttcaggccgccaggctgctgggcatatctgcctcggcggtgggtaagaatgtcgcccggcttgagcataaactgggggtccggctgttcaaccgcagcaccagaaacgtcagcctgacggcggagggggccgcatttctgacccgctgtcagagtatcctggagcagatccaggaggccgagtcagagctgaccagcagtctctcacagcccaccggcaaactgaggatttcactgcccgtcattggctaccgcctgttgctccccgccctcaccgcctttagccgtctttatccgcaggttgaactggatctcgactttagcgaccggctggtcaatctgatcgatgagggagttgatgtcgctatccgcagcggtgaattagcggactcccgcttgatcgccagaaagctgggaggttttcgttttgtgctctgcgccagtccgacctatctggcggaatacggcgttcccggctcaccagcggaattggcggcacacaagtgcatttttttccgcttccccgcgacggggctgatccagccctgggaactgcgcggtatgcgactgacgggagatttcagggccgctgccgtgatgacggtcaataacattgaggccgccattcgcttaagcgtggcggggatgggcatcgcttatgtgcctgattttgtcgtgcgcgaggcaatggatgagggacaactgcaggaggtgttgcccggctgttgcgtcaaggatgggcatttctcggtcctgtggcccgccagccgctatctgtcaccgcgaatacgctgttttatcgattttatggctgcggcagagatacccttgtcacccgcatcggcacccccaccccttgtatctaacaatttgaggtgattagctacccccactgaagcagagtgtgccgcccccttccctttaggtcagaaaagtctgcaccgctgaatcctgatctgcagcgtatggccctccgcttcacctttcataccagctcatctgggtgaacggttagtgggtttgaggtttactcaaccactacaacgactttgccaacctgtccatttgcttccatatagcgctgtgcatccgcaatatcctcaagcggaaatgttttatcaatgacaggtttcagtttgccggaacgtaacccttcggtgacgaaggattttgcgcgtgccattttttcagggtccgtcgtaatttcaaacagctcatatccacgcagcgtgagatgcttaccgagaatatcaaagacaggcacaagaaggtcgcggctgtctagcgcgccgtactggaagaacatcccttgcggtgccatcacctgggtcagttttgccacgtccggcccaccgacaggatcaaaaacaatatgggcgcccatgccatctgtcgcatgattgatttccgcaaccatatcctgctcagcgctagcgataacagtggcggcacccgctttaagaagcatgtctcttttttcggcagttcgggtaagcgcaatgggtttagcacccagcatgttagcaatctgtatggcagccagtcctacgctgcttgatgctgcgcggatcacaacattctgcccagcctgaaggttgccatattcaaccagcgcgccatatgcagtgacatacatcatccaacttgcagcggcttcctcaaaggaaagattttcaggatgcttcacaacagcgtgcacaggtgcattgaccagttcgccgtacatgccgtattcattaaacataaacgaagggattacgctgaccagatcgccagtggtaaacgcctcaacattctcacctacggcctgcacaacgccagccgcttcataaccaagacgtgccggaaattccggctcaataacatattggccgttgcggtacatgatttctgcacgattaagaccgatagcctgcacgcgaatctgaacttcacccgctgctggtgcgggcacctccatatcgacaatttccaaaacttccggaccaccggtgcggttaaaggtaacaactttagacatattcagctctcgtcagttatcagcacatctttcgaatattgttgaagacatgcccggtttatttactgacaatctacgctgctataaacgtaccaaaaatagctgacagggaacttcagtattaattatctgttaacaatccattggtttcagcggttctgcatggtcagaacttcactgaaccagtcgataaagacccgtactttgggcgaaaggtagtgcctgtccggatacagcaccgacacaggcttagacacagaagggtattgcgtcagaatctcttcaagagcgccggaagcaatatgtggagcaagggcgttaaaggtggcctggattatgccgaggcccgccagtccacaggagagcagaatatctgaattatcaaccagcatgctgcctacgggacgcaacgaaacaatcttcccgtccttagtaaatttccattccatcacatcacgactgtggtcgctgaaaaagtttattgcccgatgctgatccagatccgcaagtgtttccggtcgtccatattgttgcaagtaagacggggctgcacaggtgaccatcctgatgtcaccaagacgtctggaaataaaactcgaatcctgaagctcacccaggcggacaagacagtccacaccttcactaatgagatcggtttttttgtccgatgaaaccaatatgacatcaatgtcaggatacagtgactggaaatgtttgagattagggatcagtatggcgtgagccagcgccagcgggacatcaatcctgagccgcccccgaggtggaagggtaggtgaaaagctcgccatcatgtcattaacttcagacaatacaagcctggcacgatgataaaacgcctccccttcagccgtaacgctcaacttacgggtagtgcgatggatgagttttacgccgaggtcgtcctctatctgctgtatcgctttgctcacggtgggacgatgaatctgcagaatgtcagcggcccttgtaaagctgccctgctcaacaacctgtacgaaaatattaaggtattcaatcatgtttgaatgcacgtgatcacctggctttagttaggctgttcgtagctggtattgtaaagtaaacaattccgatgggcatcaaactaaggacttgatggctttcaaaatgtgcgctcctggctcgaagcgggcgtactgggtgagtttaaagtccgctgtgagcgaagagcggatattcagaccgactgatagctgattttgagttgccaaaaagagcgctcctattcagtacaaaaaagatggtaatgtttcataaaatctcttagaccttgcaggaatggttttgaaatgaatggatcttgtttgtgtggaacaattgaatttgaacttactcataaaccagcagtgttttatcgttgtcattgctcgctttgcagaaagcagagcggtgtgggttacaatctcgccacactagtcaaagacagtgagtttcgctggattaaaggggaaaactgcattgcttcatggtctaagccaacggggtaccgtacagatttttgcaatgtatgtggctcaactgtgcctaacagtctgcgagacgtaccttatgtctgggttcctgttggtttaattgacgaacgtcttgaaatggaatgtgcaggagacttctgcactgatgatgcaatgccctgggatgaaacccgctcacctagttgtcacgctggacctgtcgagtcgctagcctcgcttttaaagtacctgaaactcaattcctgagcgtcagcatttggcagattctgttgaaaaagtagctttagcggcagcctgccgatcaggtgtgcctgctgtcgaagtggctgcaagccacttcaagttgccttccggcgtttcactgagcgtccttgctcaggtttaagggttaatttgagggtttctgctcgtagcaggcatacctatcccgtcagcggtggcccttgaggcaaaagcttggccatgcggcgcaggttctgcaccatcgcagccaaggtgaattcgtcagtggcacccgttaggccacgcagtcgtaaacggtcgagtttcatgatccgtttgaggtgggcgaaaagcatctccaccttctttcgttcgcagcgagagacgaggtactccggtgtcttggcgatgcgtcgagccacgtcgcgggcagcctcatggatgctgcggacgatcttccgattcggcgtgttggggcagcatttcgctttcaacgggcaggtggcgcagtcggtttggctggagcggtaaatgacggttttggccttagttacccgcgacctttgctgggtgaaggcgcgccattcactgcgtagcggtttgccggctgggcagcgatattcattggcgtcctgactccagtgaaagtcgttactggagaggctgtcgtccttgcgctcggtcttgtcccacaccggcacatgcggttcgatgtccttttcttcgaccatccaggccagcatcggggcggtgccataagcggtatcgccgataaggcgttccggtgtgagatcgaactgcgcctcgacacgctcgaccatcgtcctagtcgaatcgacttcggcggtacggtgcgccggggtagcttccacgtccatgatcacaccgtgctcagtgtcgatcaggtaattcgtggagtaggcaaaaaaggccgggccacctggcgctgctgtccaacgggactgaggatcagtgagcgaaattttcttgggaagagcctcagccagcgcctcttcatcaagggcttcgaggtactcgcgcactgcgcggctgctgagctttggatcgttccaatcgacctcatctcccgccaccccacgttgccggctggcatccgccttaatgatgctggcgtcgacggcgaaaccttcacccttgactaggccggctgccatgcagcgccgcagcacctcattgaataaccagcggaatagatcgctgtcacgaaaacgcccatggcgattcttcgagaaggtcgagtgattggggacttcgtcttccagacccaaccggcagaaccagcgataggccaggttcaggtgcacctcttcgcacaatcgccgctcggaacgaatgccatagcagtagccgacgaccagcatgcgcaccatcaactccgggtcaatcgagggacgcccgatggggctatagaaatctgccaggtaggcacgtagatcactgagatccaagcactggtcgatgctgcgcaggagatgttgggccgggacgtgatcttccagattgaacgagtagaacaggcgctgctgtcctcccggtaactgtcccatcatgctgttcgcccccacgctcgctgacaaagcaattttgccaacggcatggggaggccgctactttttcaacagaatcggcacaaagcagacgttaaaacctacagcatcggaaagcttctgaatgccgcgtcagcggcatggaggcgccagataaggttacatgtgtctgtggagtcaaatggcgccgaaagcccggcgtagccggttaccagcctataaattctgcctccgccctgccctggttagcctgaacccactaacagcaatcaagaaagttaaggtaatccctttaaccccggagcgctggctttacggcgtttacgacataaagggcgtgatttcgaggtccttagtcgaggtagcttgctgctgacgcttaggggatattcttcagttatttcaacgacaccagggaacttaacacggtagctgaaaagctcagcgccggatatcctgccgcccggccagcgaaagccggcggcaggtatacctctcaaggcagcatcttaccctttggcaaaattggcctggatccgctgctgcagataatcctcggcgctgatgggcgggtacttcctctgcggcccgaggatctcgacatctttattggcctggcaaaaaaacgccaggctgtagcgcggcccctgatattcatggggcagcgggtttctcacccggtggaagttagacggcagctggtcgtcgctccagcgcatcagcatatcgccgatattgcaggtgatcacctcctcccgcggctcaatgctggtccactgctggctttcgcggtctttaccgggacaaacctgcaggccgccctggccggggcgctggaacagcagcgtcagacagtcaaaatcggtgtgcgcgccggcccgccacatcccctgctgcgactgctcggtcgcatagtaatgcagcatgcgcaaggtgctctggtaggtgtcacgctgcggatcgtgcgcggtggtgaaaaacgattccggaaaaccaagcttcaaagcaaagcaggagaggatcttcatccccagctgccagcactgcgattcaaacccgagcatcgtctgcttgaatgctggaaactcccgatcgctgggccagcgcccggccatcagcggccgggtgatctgatacgactctttttgatccggcgtgcgggtcgatggccggacctgcgctttgctctcccagccggcgttgccggccagcggatactggcgcttcacctcgtcgggcaggtcgaaaaacgcctcggtcatgctgaacgcctggcggatatccgccagcggaataccgtgatggctgacctggaagaagccaatctccaccgccgcctcccacagttgttcggcaatgtcattttttcttgtggcaaagttcgacaggtcgatacagcgcacttcgcgggcgaaggtctcttcgccctgggcgcccatcagcgcctctttttccagttcctgtaaggcgtagcgttgattctgggtggtcgaggtcatcgtcattatcctgttatcagttacacagcggcgcgctgttggagggtacggacggccgccagcgcgtcgtgacgcatcgcgtcaaggtcgagaccgggaatggcgtcgtcttccacgatggggcggccattgagcagtagcgccttcagcgcggcgcgcccaccgcaggccaccggcccaatggccatatcgtgcaggccgaagtagcgcggatcgtccagccggtaaatggcaaggtccgcctgcatcccgacctgcagggtgccgctctgcgctaagccgaggatctgcgccccgccggcgctgccccagcgcaccacatcctccaccgtggccgcatcggccccccctcgaaggcgcccccggcgtagcgcggctgcgccagcatccccttgcgcgcgcgctgtagcagccatgcggcatgggcttcgctttgcatatccgccgcttcattggaggcagcgccgtccacccccagcgagaccgggaccccggcctgctccagcgccagcagatcggcgatgccgctgcccagccggccgttgctttgcgggcagtgggcgatgccggttccggtgcggcccagcagggcaatctcctccggcagcagcttcaccagatgggcaaaccacacgtcatttcccagccagtcgtgttccgcgcagaattgaaccggcgtcatggcgaatttctgccgcgcggcgtcgagataatcgacggtttccgataaatggctgtgcaaccggatccccagctggcgggccagcttcgccatctcccgcagctgggcgcccggcgcggagtgcaggacggtagtgggcgccatcaccacccggcgcagagaatcgggccgggggtcgtgatagcggctgaccagccgttcgatatccgccatatagccgtcgaaggtttccggacgcagcgccaccggcagatcctgctccaccgcccggccctgggtcgccccaccccggcacagaacgatgcgcatccccagcgcttccccttcgctgaagacaatctccgaggtatcgaaaggcatatccggccagtacaggtagttgtgatccgccacgctggcgcagctcgagcgcagaagctccaccaggccgatgcgcaccgccagacgaaaggtatgttcatcgaaagccgcgcgaaagcggtacggcgtagcgctcagccaggccgtcaggctctggttcagcccctgcggctcgcccttcagcagcgactgaaaaagatggtggtgcgtgttcacccatgccggatagatcacgcagtcgcgggcatcgatctgtcgctcttccggcagcggcgtcaggctgccgatggcggcaatcttgccgtcgcggatgcgaatatccggcccggccagccgcgccgcctctccgggcagaccgctgaggatggcatgggcatttttaatcattaatgacatggcgtcgctcctcagggtttaacctgcatggcctgaacaaattcggtggtgtaggcctgtttccagtcggtggccgccgccagcagaccggcgctgaccataaagtcgcgggtcttctgccagcgcgcgtcggtcatcgtcccccagccctggctggcggcatccccgccgtcgatcaggtgatgctcacggatctgggtcacgccccaggcgagcagatcgtcggtcattttcgggttgtcctgcttaatcagcgcatttcccggcgccggatccttgagatagctcacccagccctccattgaggcgcggacgaacttcgccatcgccgctttacgctcggcgatggtatccgggcgggcgataaggatgccgccgtaggggggatagccgtgttcggaaaagaggaagaagttcgccttcaccccggccttctgcacctggaacacctcggagctgacataggcctgctgggcgacagcgtcatcgacgacaaagggttgaatattgaaggtataggggcgaacctgcgcgtcgctcagctggtattgcgccttcagccacggccaccacgtcgcctgaccggagctggagaccagcagggttttgtctttcagcccctgcagggaggtgacatcggcatgggtcagcagcccctggggatcgtactgaaagggcgcggcaatggcctttgcctggaagccgcgctgaatgccttccagcagctgcaggtcgtaaccgatgatcacatcggcccgcttcgacaacagcaactgcatgccgttgacctgcggtccaccggagcggatctcgacgtcgagaccatattttttgtacagcccggtggcctgagcctgataataacccccctgctccgcctgggcgtaccaggaggtcagcagaacgattttctcctcggcctgaacggccagcgagacaccgccgagggccatcaggcccagccagcgtatgccccggggaaggcgtgcgcctgttttcatatccctctcctctttacgccgggagggggagcgagcgaatgtggctcagcctcccatcccggtcaacattgaaccgcgacatggtgactgagcaatgtcccgtatggataacccgtactgaccgcttctactcacactcagctatacaaaaacaatgccagatttaaacgcctgcgagcggccgcgagaaatcgcctgcgccgccgcccttgggcatgcaacctttgattcacgcacaccaaaaacgcaccataatggtgcgttaatgaatgattttagtgcctgcctggtcgctcacagctgactgaagagcatctccagctggttcaacatcatcgaggcggcaagggaaagctggcgggcgggcgagacgcacagcgccagggtgaaaggcttaagctgcggatcggttagcggcacaaacgccagctggccggactcaatctcatcgagaatatccagccggcacaggatgccgatgcccatctgctctttgatcagggtgcggatcatgtgaatgttattcgataccgccacctcctttacctcgttgccgctgatgttcaccagcgcctccaccggctcgctgatcatcaatggggcggacggcaggataaaggggtagtcgaggcactgactaaagcgcaccgcgctgcggctggccagcggatggccggtgggcaccacaatccccatattcatctcggcaaacgcccggacctgcagttcacgagaggtctggggattgagcatgatcccgaaatccgcctcgccggagatcagcgcctgctggatgtggatattgttgatggtggtcaatgtaaaagagatgttgggataatgtttatgcacctctttgagcatcgtcgaaaagaaatgccggttaatggcatcgatggtggcgatgcgcacatgcccccgccgcaacccgcgcagatcgtccagctgctcgcagacccgggtaaagtcctttttccagttattggccgcgtgcaggagcagctccccggcggcggtcagcctcagcccggtgggatggcgctcgaagagcggcatcgccagttcctgttccacgcgcaaaatctgacgatcgatggaagacgccgacacatgcagcgcctctgacgctttacgaaacgatccctgacgggccacttcagtgaaatagagcagaaatcgggagaaggcaaacatggtttgggtgctctcttttttgcaacgggttgtgcgaatcaaagctctggacgcaacagttttatcacaataccgtagcattcatagcggagaaacgatcgtttcacccattttcttgcacgccggacagttcaccgcgaaggggagttatctcttcgccgcccctggccgccctgcagacagcggaatgagggagagtaaacggtaatgcacagccacgatcttatttcggtctcggtcggggaaatacgccccaacggagagggaaatctatcattaatattgcaggcggcggccggggaaatattaccgacctactctgccggggcgcatatcgatattattatccccggcattggcccccggcagtattccctgtgcggcatgcctgaccgcggcaatggctatgaagtttgcatcaggctgactgacacctccaccggcggctcacgctatttgcaccagcagctcaaagccggcgatcggctcgccatttcgcctccgcgcaaccattttcccctgccggaggccgggcgctacctgctgtttgccggcggtatcggcatcacgccgttgctggcgatggccgaagcgattgccgccagaaagggggggctggagctgcattattatgtcgccagcgcgcgccagacggccttctccccgcgcctgacccagctggctgcgggcggcacggtggcgatccactgtagcgaggaaggcgcgtcgtttcgccagcggatccccgcctgcttaaccacgcccgatcctgataccgcagtggtcgcctgcggcccggagggttttattcagcgactgcagtcggtcatggaggaatatcgctggtcgccgtcgcaattcgttttcgagcgttttactcccgcgacggaaaataatactgcagcgaaaaatgcgttttatattgagctggcctccagcgggcagcgcctgcaggtcgccgcggatcaaaccattgctcaggtattacagcacgccggggtggaggtaatgctctcctgcgaacagggaatgtgcgggtcgtgtattaccggggtcctcgacgggatccccgaacaccgggacagcgtgctgacggcggaagagaaagccggcaacgaccagatcacgctctgctgttcgcgggcgaaatcgccgggtctggttttggatctgtgaggagactgacgatgacgctcccctcctcttgtgcgccgctcaccggtatcagccgcgcccgactcccggcctgggtgctgcccgacggctggccgacgcaggccaacggtgaaccgctgctggcggacctggcctttcgcgacggccggatcgccgcattgaccccaaccgaccagccgactcccggcctgtgggacctggcgggagccctgacgctccccggcctggtggaaccccatgcccatctggacaagacattcaccattgaacgctgccgtccggcgcaggccgggctgctggcggcaatccacgccatgcacgaggatcgccgacactggaccagggcggatattcaacgtcgggcgtccgccgcgctggcccgggcggcagcgaatggcgtgacccatttgcgcagccatgtcgactggtttaccgccgacgcgccggacgcctggcaggagatcgcccgcctcgataccgtcggcatcaccctggagcgggtggcgctgatcccgctgcccttgtttcgcgagctggcgcaagcggaggccatcgcccggacggtcgccaacagcggagagcgctgcctgctgggcggcttcatccactcctccaactgggacgccgccgccatggaaaatctgctgtgcagcgcagcccgctgggatctggatctggatttgcatatcgatgaggagctcagcgaagtgtctcaggggctgacctggctggcggatcatctctcccgccacccttttcccggacatatctgctgcagccacggctgcgcgctggccgccggcagcgacgaacaggcggcgccgatcctgcgccagctggcggcgcacggcgtcacccttatcgctctgccgatgaccaacctgctgctgcaggatgcgacgttcggccgcacgccgcgccagcgggggatcactctgctgcacgaggcgcaggccgccggcgtggccaccctgctcggctgcgacaacgtgcaggatgccttctgcccggcggggagctacgacccgctggacaccctggcctgcggtctgttcggcgctcagctcagcgacctgttcgaccagcagtcgcggctgatctgcgatcgcgcggcgctaaccggttcgccggcagacgcggcgccctttgccgtcggggcggcggccagcgtggtgattttcccgggtagcgaccgttttacctggcctttaaacagcgccgcccgtctggtggttaaccacggcaggttaacccaccgacgcgtgtggcaggaggagatggcacatgagtcttgaagcaggcgccggggcgccgctggcgcggtatgctgcctggcgcagagccggcgattttatctttctctctggcattattccggtcaatcccctgaccggcaccatcgtcaacggctttcaggatgtgcctgagccggtgcgggagctgctgggggcgaccggcgaattttcaaccgatgcgaaacagggcccgatcctcgcccagagctggtacgtcctggagagcatccgccgcaccgtggcgtccgcgggagggcaaatgagcgacgttatcaaactggtgcagtactttcgcaaccttgaccattttccctattacagccgggtcaggaagctgttttaccccgaccagccgcccgtttccaccgtggtgcaggtcagcgaaatgctgcccgacgccacggtactgattgaagtcgaagcgaccgtctggttacccccgtcatttaactccgaggcaccgcgatgattaacggttacattcctgccgcgcgctttcttccttttctgagctggacggacgtggccgccctgccggataaaagcaatacggttatcgtcctccccaccggggcgatcgaacagcacggcccgcatttgccctgctcggtggacagcgtgatatcttccggcgtggcgggccatgccctcgccaggctgccggcgacgatcccggcctacgccattccgccaatcgtctacggtaagtccgaggagcatctgcattttcccggcaccctgacccttagcggcgatacgctgctgcataccctgctggagatcgccgaatctctctatcgggccggttttcgcaagctgctgatgatcaacggccacggcggccagccgcagatcctgcagatcgcctgccgggaaatgcgcctgcgccacggggatttcatcgccatcccccacgacgtgttcaacgtgcccaactgcgaaaaacagtttctcagcccgcatgaacagcggatggcgatgcacgccgggcatagcgaaacggcgctgatgctggcgctggcgccggagtgcgtccatatggaacgggccgtcgctaatttccccccggaattcccctgcccaaccctgtcgaaaggccgtccggcggcggcgtgggcgtcgtatgactttggccccagcggggtgattggcgacccgaccccggcgacgcgggagcaaggcgaagggcttctcgactccctcgccgccagctgggcgcaggcgatcatcgagatccaccgcatggcctgggtcgaacgtcgcgaaccgacctggggcaaacagcactggcacggctttgtgcagtccctaccaccttctttcgctgctgaatccagggagccctgatgaataccagattgacgcccgtttttaccctgctgaccgtggccgccctcgcgacctcagcctcctgcttcgcggcggagaagtttacctttctcaccaactggtatgcccaggccgagcacggcgggttttaccaggcccaggccaccgggctgtatcaacacgccggtctcgatgtcgaaattaaaatgggcggcccgcagatcaacgtcatgcagctgatggcggccggtcaggcggattgcacccttggcgacaacggccaggcgctggagacctggcaggccggggtgcacgcggtgaccgtcgccaccgtgttccagcactcgccgacggtgtttatcacccatgacaaagtggagaacccggcggaacttaaagacaaaaccttcctgctcgccaccgaggcctatacctccttctggccgtgggcgaaaagcgagctgggtctggctggcagcaaagtgcgcccctatacctttaacgttcagccgttcctcgccgataaaaacctggtgcagcagggctacgtgacctcggagccgttttccgtcgccaaaggcggacagccgttctatgtctatccgctcagcgactggggctacccgccctacggcaactcgattatctgtatggccgacaccatccgcaaacgtccggcggcggtggcggccttcgtcaaagcctccatggaaggctggaaaagctacctgcgggatcccgcccccggcaacagcctgatcggtaaagcgaatccgcagatgggcgccgagcagatcgcctttggcattgcccagatgaagcagtaccagctggtgaccggcggcgatgctaagtccggcggcatcggcatcatcaccgagccgcggctgaagaaaacctgggacatgctggtgaaaaacaaactgatcgacgccagcaaggtgccgtttgagcagacttacaccctggagatggtcaaagacgccggagtgatgccatgaataccgccccgaaactgaccgtgatgagcgatacccgctttatacccgccgctgccaccccggccatcgaggtgctgtcggcggagaaaatctacagcaacggcacccgggcgctgctgcccgtcaacctgaccatcaatcagggggagtttattaccctgctcggcccgtccggctgcggtaaaagcaccctgctgaagatggtcgccggcctggtggagcccagcgacggcaagctgatgctgtggcggcgcgacagtcgggaaaaggcccagcatccgctgtcgttcgtcttccaggaagccaccctgatgccgtggagcagcgtgcgcaataacgtcaggctgccgctggatctggccggcgtgccgcgggcggagggaaatacccgggtgagtgaagtccttgagctggtgggcctcggcaagttcgccgacgtcctgccgcgcgaactctccggcggcatgcaaatgcgcgtctccatcgcccgcggcctggtcacccgaccaaagctgctgctgatggatgagcccttcggcgcgctggatgaaattacgcgtaacaaactcgacagcgacctgctgcgtctctggcaggagcaaaacctgacggtagtgttcgtcacccactcgatccacgaagcggtgtttctctcccagcgggtgatcatgatggcggcccgtcccggacgggtggtcgaagatatccccatccgcgagccgttcccgcgcagcgaggcgttccgcgtcagcccggccttttccctgtatgcccgtcagctgcaggacagtctgttgcaggccagccagtccggtatggagtcataatatgaaaaatacaaccgcaacgccgtggatccagcatccgcgttttctcaaaattctctatccgaccctcgtcgcggtggcgatggtgctcctgtggcagggcgcggtgagctatttccgtatcccggcctttctggtgccgtcgccgctggtgatgctggaaagcctgtggacgcatctcacgccgctgctgctggcgctgctgttcaccctcaagatcaccctgatctcgtttctgctgtcgattgtcatcggcgccgcggtggcgtttatcctggtgcagaaccgctttgtggaaaccgccctgtttccctacatcgtgtttttgcaggtgacgccgatcgtcgccatcgccccgctgatcatcatctgggtgaaggatgccacgctctcgctggtggtgtgcgccaccctgatggcggtgtttcccatcatctccaataccactcagggactgcgcagcgtctcccccggcctgctgagctattttcgcctcaatcacgccagccgctggcaaacgctggtgcggctgcgtatcccctcggcgctgccctatttcttcggcgcgctgcgtatttccagtgggctgtcgctgattggcgcggtggtggcggagtttgtcgccgggaccggcgggaccaataccggactggcctatcagatcctgcaggctggctaccagctggatatcccgctgatgtttgccgcgctgctgctgatctctctcgccggtatcgcgctgtttggcgtgatgtcctgggtttcgcgccgggcgcttagcgcctggcatgaaagcgaagccgtgcaatctcattaatgttctgctgacgaacaggaaaaagaatgatgactgatgaacagcgtcaacacgcgatcgcggtgatccagcaggcactcccggcgctggagtggaccttacagccggcgaagatcaaacggctctcccgcgattttcactggttcagtccgctactcaccgagcaactggcggggaaacaggcggacgcggtggttcgcccgcgcgatgaagaggagctgcgccagctggtctgcgcctgcgcgcagcaccagctgccgctgaccctgcgcggcagcgccaccggcaactacggacagctggtccccctcgaaggcgggctgctggtggatatgaccgggctcaaccagatcgtcgccctcggcaacggcacagtgagggcccaggccggcattcgcctggcggacatcgaaaccgccgcccgcccgacgggctgggagctgcgctgtatgccatcgacctatcgactggcgagcctgggcggtctctacggcggcgggttcggcggtatcggctccatcaactatgggccgctggcggcgcccggcaatgtgctcagcgtcaaagtgatgaccgtcgagccggtcccccgcgtgctgaccgtcccggctcccgaagcgctgctgctgcatcacgcctacggcaccaacggcattatcctggaggttgagctggcgctggcgcctgcgcaccagtggattgaacgtctggacgtgtttgacgatttcgccgatgcgctgaactatgccaacgcctgcgtccgctcgccggggctggtgaagcgtcaggtggcgctgctggccacgccgatcgctgactattttagccacctcaaggatcgttaccgcaccgggcagcatgcggttatcagcctgatcgccgaggagagcgaaggactctgcgccagcctgttaccgcgccatcgcgggagcaacgccatccggcagttcagcgaggaggcccggacgcgcaacggctcgttaatggaatactgctggaaccacaccaccctgcatgcgctcaaggtggacaatacgctgacctatctgcagacggcgtttgatccgctgcgctatccgcagcaaattttacagatggagcagcacttcgccggggaggtgatgtcccatattgaattcctgcgcgatatcgagggcaatctcaccgccagcggtctgcagctggtgcgctataccacgcccgaacgtcttaacgccatcatgcagatatttcgcgacaacgacgtcaagattaacaacccccacgtgctgcaggttgaggacggcaaacagggcgtgattcgtcccgacgtcgtggcagtgaaacagtctctcgacccggcgggattgcttaaccccggcaagctgcgcggctgggcgctgcgcgaccagctggaactcgacagcaacccgctgacgcgggccacccgcgaaagccccacgacctgatggtccccggtccggttgggcgctaacgggtcgctggcccgttgccgcccaacctcatcctgcgccggacagtcccgccatatggacgataagccctactgcggcggcggccaacggcgcggtaaatcccactttattatgggtggtttcaataaacgacccgccggcgtgaataaagataaacgagggcaaaaggtaaaccatgtcaccaggcacgccgccgcgatgcccccagcagcacttcatcaacgcccaataccgctttggtgtaaccgccgacaaacccgacaaaggtcaccatcatgatcaacggtccgggggtcgattcccccagggcgaggacgtccatcatctgccctgcggtcagccagccatagtgggtcaccgccccctggtaaacgtaaggcaggacggcatacgccccgccgaaagtcatcagcgcggctttggtaaagaacccgctcatctgggccagcggatgcgcccagcccagcattagcgccagggcggccatcggcaccagccacagcagtatcccggcgctggtgctgttcgccctgatggaatggggccaccagcacgtgctgcatagcgcgtcgcctattgcattggtggacagcgccagcggcgagaccgtccatccggggttcgtcaccgccagcggcagcgtggcgagccccagcgcgctacagatcgtcaaagccggtacccatgccgaaacctgaggaatgtattcctggcactgcttgccggacgcgcggcctcgccattttcgaccggccacaaaagccctgggataggatgaaatctggctggaaacgcgccagtgaagaaaggatatcgtcaggcgggcagcagccccctgctgcccgcctgacgtgtgagtggcgttaattcacccgcgcaggcaaggtaatttgctgcagggcgttcgccatattaatctgaatcagctctttaagaccttcgcgcttaataaactggctccggtgcttacttttcacctcttcaatactctttttgatctcttgcgccggcagtttataccagccgcgagcctgtttctcaccgcccatttccagccacagcgatgaataactggctttcaccagatcgcttttcacgtgataatcagaatcgatggcgtagaccgtggagatgttgaaatatcgcagcaaaccatacagcacgctcatgatgatatttttcggccgcgcgccatgcagctctttagtcagcaccttcacttcgtcattggtgatatctttcccgccctggatgccgccgatataagcgcggccatcgtcggtgcaggaaaaacagacgctatagacgcgccggtcgccaagaaacagctgcagcatcagctccccttcctcctgaaacggcgaggccagcagcttaacgtcaagcttatcgccatttttcaagggaatagaaaacatctcgcggccaaaatccgcgacattgtagagctgcggcagcacatcagggtgaaacgttttctcgatgaaattcagtgaaccatgggcaatatccagtttgcgtcgttttgacagccgtttattgagatacgctttaaacggtttatcctcaaaaggcaccagtcctttggtcaccgcggtcaaccgcgcgcactgatatttcgcacaaagtccttgatattctctgtatttacctcctgcgagcgagagctctctgcattttcgtaaaacttttttatagcttattttgacctgaccgatcactttattatgtttacgccattctttgatggcgcctgcaacagtatgttccattgattaagatccatagattcatccataatcgcggccatattaacataaaagcgtttcgtcaacgcttaattactccttcgttgtcctttcatttaatatttaggcaggaaattatcctggcgacgttatttgtcgttaaacttattctgtcaacgatgaattatggtaggtaacgccctccgctcagcgacttaacgctctgtgccttcggcgcgaagcgcggctacaaccgctggcggttatgccctatacttgaccctgattcaaaaccagcaacgataggtaacttatggaaattgatctcgacaacctggtcttcagcggcctggatgaagcggaagagcgcaacgcggagcgtctggaagaagcggacaaaaaagcccaggcgatcgttgccgacgacgactgcggcgacgcctgtaaaatctgattgtcaaaccggccagcaggccggttttttttgacgcccacacctcaggtgggtaaaaaccctttcagcgtatccagcagcgcctgcgccgccttcgacagcggcagatgtccggcatggatcgcgccgacgcacttctcaatcggcggatcgctgagcgggatgcagacggcgcccaacgatgccatctgcgttttacacagcgccggcaccgcgctgccccccaggccgctggccaccatcctccccaccgtcaccagctgatgactctccagcgccacatccagctgacgtccgctgcgcgccagcgcctcctccagcatcaggcgtaccgccgaggggcgctgcagggtaataaagtcgagggtcaacagctcctgccaggtgagctgctttttcttcgccagcggggattgttggggaacgatcgccacgaagcggtccaccgccagcggggtaaacagcaggttgtggttgggcgatggctcgaaagcgatgcccatctccacccgcccctcgcgcaccatctcgatcacctgctcattaatcacgtcatgcaccgtaacgttcaccccggcatagcggtcgcggaaggctttcagcgcctccggcagaacgttggcggcaaacgacggcatcgcggcgaccgaaattttaccccgctgcagggtaaagctctgacgcatggcctcctcgacgttatcccagtcggccagcagctgacgggccatcggcagaaagagttccccctcctgggtgagggtcactttgcgggtgctgcgctgcagcagcgcgccgcccagcgcctcctccaaccctttgatggtcaggctgagagctggctgcgacagattcagcctttcgctggcgtgggcgaaattcagagtgtgagctaccgctaaaaacgcgcgtaactgtttgacactcattctcatttttcatcctgttaactaattgaaaaaaattagttaacaggaaattaattaaaattccaaatgagtgagtcacaaattcaaaattatcaaatcagtcgcctgcgccaatgataaggctatcgcaaggcaggagagacaagatggcaggactggataaacgcgtcgccagttacgaagcggcgctggaagggttaacggacggcatgacgctgctcgccggcggcttcggcctgtgcggcattcccgagaacttgatcgccgaggtgcagcgtcgccaggtgcaggggctgacggtggtctccaacaactgcggggtcgacggtttcggtctcggcatgctgctggagtcgcgccaggtcagcaaggtggtggcctcttacgtcggggaaaacgcgctgtttgaacagctggtgctcagcggcgagctggcggtagaactcaccccgcagggaacgctggcggaaaaaatccgcgccggcggcgctggcatccccggcttttacaccgccaccgggtatggcaccccggtcgccgaaggcaaagaggtgcgccagttcgacggccgacactacatccttgaagaggcgatccgcggcgatttcgcgctggtcaaaggctggaaagccgactggtacggcaacgtggtctatcgccacaccgcgcagaatttcaacccgctgatggccaccgccgggcgcattacggtggtggaggtggaagagattgtgccgccgggcgaactgcccccctccgccatccatactccggggatctatgtcgaccggctgatcgtcgggcaattcgaaaaacgtattgaacagcgcaccctgcgcgccggagggcactgagatgctgacccgtgaacaaatggcgatgcgcgtcgcccaggagctgcgcgacggcgactacgtcaacctcgggatcggtatcccgacgctggtggccaactacattcccgccggcattgaagtgatgctccagtcggagaacggcctgctggggatgggcgaatttcccgatgaggaaaccatcgacgccgacatgattaacgccggtaaacaaaccgtcaccgcgcaaaccggggcggcgatcttcgattccgcccagtcgttcgccatgatccgcggcggccacgtcgacctgaccgttcttggcgcctttgaggtcgacgtcgcgggcaacatcgcctcatggatgatccctggaaaaatggtcaaggggatgggcggcgccatggacctggtggccggcgcgcagaacatcatcgtggtgatgacccacgcctcaaaaaacggcgaatccaaactgctgccgcagtgcaccctgccgctcaccggcgtgggctgtattcgccgggtactcaccgacctggccctgctggagattgtcgacggcgcgtttgtcctgcgcgaagtggccccgggggtcagccccgacgaggtgatacgtaaaacggcgggacggctgatcgtcgccgacgacgtgcgcgaaatgcgcttcagttaaggagagaccatgaccgatattgccattgttgctgcagtacgcaccccggtaggcagctttcgcggcgccttcgcccctctttccgccgtcgacctcggcgcggcggtggtgcgcggcctgcttgaacgctgccagctgcctgccgcagcggtcgacgaactaattttcggccaggtgcttaccgccggctgcgggcagaatccggcgcgccagaccgcgctgcgggccggcctgccggtcgacactccggcggtcaccgtcaatctggtgtgcggctccggactgaaagcggttcagcaggcggtgcaggcgatccgctgcggcgacgccgggatcgttatcgccggcggccaggagagcatgagcaatgctccctatctgatgcatggcgcccgcgacggcctgcgtttcggccacgccagcctgcaggacagcatgatccaggacggcctgtgggacgccttcaacgactaccacatgggcattaccgccgagaacctcgccgacgccttcgacatcagccgcgagcgccaggacgccttcgccgccagctcccagcgcaaagcggcggctgctatcgccgccgggcgctttcgcgaggagatcgtcccggtcagcgtcccgcagggcaaaaagccgccgcgattcgtgactgacgatgagcaaccgcgcccggagaccagcgagcagcagctggcccagctgcgcccggcgtttcgcccggctgacggcagcgtcaccgccgggaatgcctcgtagctgaacgacggcgccgcggcggtcctgctgatgcgcgtcgataaagcgcgcgagcttgggctgccggtgctggcgcgcattgtcagctcagcggtcgccggggtcgacccgtcggtgatgggcatcggcccggtgagcgcctgccgccaggcgctgcagcgcgccggctggacgctggacgaggtggaccttatcgaagccaacgaggcttttgccgtccaggcgctggccgtcggccagctgcttgaatgggacagcgagaaggtcaacgtcaacggcggcgccatcgccctgggccatcccatcggcgcctccggctgccggatcctcgtcagcctggtgcatgagatgcagcgccggggcgccagcaaagggctggcaaccctgtgcgtcggcggcggccagggcatcgccatgactctacaacgttaacaggagccactatgtttacaccacgcctggcggtactcggcgcgggactgatgggcgtcggtatcgcctgccatttcgcccgccacggtcacgccgtccgcctgtatgacaccgatccgcagcgtctcgccgaggttccggcagtggccagcgccattctgtgcgagctggaggccagcggtcaacaggatcccgccgaccgcgacgcggtgctggcccgtctgacccccaccccgacgctgaatgccctggccgatgccacgctgctgattgaagcgatccccgaacggctggcgctgaagcacgccctgtacgccgagctggaaacgctgatcgccgacgaggcgattatcgccagcaacaccagcggcctgccgccggatcagctggcgcagggcatgcgcctcccggaacggctactgatcgctcatttctggcatccgccgcacctgatcccgctggtggaagtggtgcccgggagcgccacgctgcctcatctggcgcgcgaggtgagcggcttttgcgccgcctgcgcgctggaggcggtggtgctcaaccgcgccgcgccgggctttgtcggcaaccggctgcagttcgccctgctgcgcgaagcactgcatatcgtccacagcggcatcgcttccccggaggtggtggaccaggtgatgcgcgcctcgctgggccgccgctatgcgatggtcggcccgctggaggctgcggacatgaccggcctggcgacagtccaggatatctgccagcacctgctgccggagctggccagcggcacggagatgatgtcgctggtggcggagaaagtggcgcgaggcgacaccggcgcccgcagcgggcaaggcttttaccgctgggacgaggcccggcaccagcgcatccagtcgcgccgggaacaccagctgcgcttcgccctgaaaccctagtatcgcgttctgtacccctacaataacaatgagagtgagacgtcgtgatgagtgtgataatagccctggccgcgctggcgttactgatgctggcagcctaccgtggatacagcgtgatcctctttgcgccgatcgccgccctcggcgcggtgctcctcaccgacccgggcgcggtcggcccggcctttaccggcctgtttatggaaaaaatggtcggctttgtgaagctctatttcccggtgtttctgctgggcgcggtattcggcaagctgattgagctgtcgggattctcacgttcgattgtcgccgccgccatccgcatccttgggcgccgccacgcgatcccggtgatcgtgctggtgtgcgccctgctgacctacggcggggtgtcgctgtttgtggtggcctttgccgtctaccctttcgccgccgaactatttcgccagagcgggatccccaaacggctgatccccgccaccgtcgccctcggggcattctcgtttaccatggacgccctgcccggcacgccgcagatccagaatattattcccaccagcttcttcggcaccaacgcctgggcggccccctggctggggcttatcggctcgctgttcattatcatcttcggtttgctgtggctggagcgtcagcgccgcaaagcgcaggcccgcggcgaaggctatgggaccgacctgcaaaatgagccggagaccccggatgacatcgatctgccgcatccgttaatcgctatcgccccgctgctgctggtgggggtgctgaatctgctgttcacccactggatcccgcagtggtacggcgccagccatgagctcaccctgccgggcctggcgaagcctgtcgtcaccgaagtggggaaaatcaccgccatctgggcggtgcaggcggcgctgctctccggcattgtgctggtgctggtttgcggctatcgcaatatccgcggccggctggcggagggaagccggacggcggtgggcggggctattctcgcggcgatgaacaccgcctctgagtatggcttcggcgcggttatcgccgccctgccgggtttcctggtgctgtcaaaagccctcgcggccattcccaatccgctgttaaacgaggcgatctgcgtcacggtgctggccgggatcaccggctcggcctccgggggatgagcatcgccctggcggcgatgtccgagacctttgtcgccgccgcccacgccgccaatattccgctcgaggtactgcaccgtgtcgccgccatggccagcggcggcatggacaccctgccgcacaacggggcggtgatcaccctgctggcgatcaccggcctgagccatcgccaggcctacggcggcattttcgccatcacggtgatcaaaagcctcgcggtactgtttgtcattgccacgttctatgtgaccggcattgtctgataccagattgaaggagtaataaaatgaacttacacggtaaaacggcgctggtcaccggctccaccagcggcatcggtttagggatcgccaaagtgctggcgcaggcaggcgcccagctggtgctcaatggcttcggcgacagcagccacgcccgggccgaagtcgccgcgctgggcaagatccccggctatcacgacgccgacctgcgcgacgtcgggcagatcgaagcgatgatgcgctatgccgaaagcaccttcggcggcgtcgatatcgtgatcaataacgccggcatccagcacgtggccccggtggagcagttcccggtggacaaatggaacgatattctcgccatcaatctctccagcgtcttccacaccacccgcctggcgctgccgggtatgcgccagcgcaactgggggcgcatcatcaacattgcctcagtgcatggcctggtggcgtcgaaagagaaatcggcctacgtcgccgccaagcacgcggtggtcgggctgaccaaaaccgtggccctggaaaccgcgcgcagcggcatcacctgcaacgccatctgcccgggctgggtgctaaccccgctggtgcagcagcagatcgataagcgcatcgccgagggggtcgacccggagcaggccagcgcgcaactgctggcggaaaagcagccctccggggagtttgtcaccccgcagcagctgggcgaaatggcgctgtttctgtgcagcgatgccgccgcccaggtgcgcggcgccgcatggaacatggatggcggctgggtggcgcagtaagccgctggcgccgcaaagatcagaacatcgccagaaagcgtttcaccgtacgcgagcgctcgaagcgccgccaggcgatggcgatatcggtcttcagcggcgccccgctaagcgggtgatagctgacgttcggctgctggatgcaggtcatcgactgcggaaccagcgcgaagccgaagcctgcattgaccatgctcagcgacgatgaaatttgcgacgactgccaggcgcgctccatatcgatcccggcgcgcaggcaactgttatacaccagctcatacagcccgggggccacctcccgcgggaagaggatcggcgccacgtcgcgcagctgctccagggcaagggtcggctgcgtcgccagcggattatcgcgcggcagcgcgataaccatcggctcctcatcgataatccgcagattaaaggctttactgctctcgcacggcaggcggacgaaggcgatatccagctcggcctcgctcagggcggtcatcagattggccatattgtcttccatctggtgcagggtcaccccggggtggtcgagctgaaaacggtgcagcagcgtgaagatttgcggatggaaagcatcagaactggtaatgcctagcgacaggctgccgttcatcccgcgcgcaatgcccttggccttctccagcgccgcatcgctcatggcgaggatctggcgggcatcctcatagaaagactctcccgcttccgtcagctccaccccgcgggttaaacgccggaacagcggggtccccacttcgcgctcaagccgctgaatttgctgacttaacggaggctgtgaaatacccagctccttggcggcctgggtgaagtgccgcgtcctggcgacggcgacaaaatagcgaagataacgaagttccatatcgaaaacgtctcaaaccagcatggtttctatattggaactgtgagctgaatcgggtcaacatttatttaacctttcttatatttgttgaacgaggaagtggtatatgaatcattctgctgaatgcacctgcgaagagagtctatgcgaaaccctgcgggcgttttccgcgcagcatcccgagagcgtgctctatcagacatcgctcatgagcgccctgctgagcggggtttacgaaggcagcaccaccatcgcggacctgctgaaacacggcgatttcggcctcggcacctttaatgagctggacggggagctgatcgccttcagcagtcaggtctatcagctgcgcgccgacggcagcgcgcgcaaagcccagccggagcagaaaacgccgttcgcggtgatgacctggttccagccgcagtaccggaaaacctttgaccatccggtgagccgccagcaactgcacgaggtgatcgaccagcaaatcccctctgacaacctgttctgcgccctgcgcatcgacggccatttccgccatgcccatacccgcaccgtgccgcgccagacaccgccgtaccgggcgatgaccgacgtcctcgacgatcagccggtgttccgctttaaccagcgcgaaggggtgctggtcggcttccggaccccgcagcatatgcaggggatcaacgtcgccgggtatcacgagcattttattaccgatgaccgcaaaggcggcggtcacctgctggattaccagctcgaccacggggtgctgaccttcggcgaaattcacaagctgatgatcgacctgcccgccgacagcgcgttcctgcaggctaatctgcatcccgataatctcgatgccgccatccgttccgtagaatgttaagggggtcacatggacaaacagtatccggtacgccagtgggcgcacggcgccgatctcgtcgtcagtcagctggaagctcagggggtacgccaggtgttcggcatccccggcgctaaaatcgacaaggtcttcgattcactgctggattcctccattcgcattattccggtacgccacgaagccaacgccgcatttatggccgccgccgtcggacgtattaccggcaaagcgggcgtggcgctggtcacctccggtccgggttgttctaacctgatcaccggcatggccaccgcgaacagcgaaggcgacccggtggtggccctgggcggcgcggtaaaacgcgccgataaagccaaacaggtccatcagagtatggatacggtggcgatgttcagcccggtaaccaaatacgccgtcgaggtgacggcgccggatgcgctggcggaagtggtctccaacgccttccgcgcggccgagcagggccggccgggcagcgcgttcgttagcctgccgcaggatgtggtcgatggcccggtcagcggcaaagtgctgccggccagcggggccccgcagatgggcgccgcgccggatgatgccatcgaccaggtggcgaagcttatcgcccaggcgaagaacccgatcttcctgctcggcctgatggccagccagccggaaaacagcaaggcgctgcgccgtttgctggagaccagccatattccagtcaccagcacctatcaggccgccggagcggtgaatcaggataacttctctcgcttcgccggccgggttgggctgtttaacaaccaggccggggaccgtctgctgcagctcgccgacctggtgatctgcatcggctacagcccggtggaatacgaaccggcgatgtggaacagcggcaacgcgacgctggtgcacatcgacgtgctgcccgcctatgaagagcgcaactacaccccggatgtcgagctggtgggcgatatcgccggcactctcaacaagctggcgcaaaatatcgatcatcggctggtgctctccccgcaggcggcggagatcctccgcgaccgccagcaccagcgcgagctgctggaccgccgcggcgcgcagctcaaccagtttgccctgcatcccctgcgcatcgttcgcgccatgcaggacatcgtcaacagcgacgtcacgttgaccgtggacatgggcagcttccatatctggattgcccgctacctgtacagcttccgcgcccgccaggtgatgatctccaacggccagcagaccatgggcgtcgccctgccctgggccatcggcgcctggctggtcaatcctgagcgcaaagtggtctccgtctccggcgacggcggcttcctgcagtcgagcatggagctggagaccgccgtccgcctgaaagccaacgtactgcacctgatctgggtcgataacggctacaacatggtggccattcaggaagagaaaaaataccagcgcctgtccggcgtcgagttcgggccgatggattttaaagcctatgccgaatccttcggcgcgaaagggtttgccgtggaaagcgccgaggcgctggagccgaccctgcacgcggcgatggacgtcgacggcccggcggtggtggccatcccggtagattatcgcgataacccgctgctgatgggccagctgcatctgagtcagattctgtaagtcatcacaataaggaaaggaaaatgaaaaaagtcgcacttgttaccggcgccggccaggggattggtaaagctatcgcccttcgtctggtgaaggatggatttgccgtggccattgccgattataacgacgccaccgccaaagcggtcgcctccgaaatcaaccaggccggcggccgcgccatggcggtgaaagtggatgtctccgaccgcgatcaggtgtttgccgccgtcgaacaggcgcgcaaaacgctgggcggcttcgacgtcatcgtcaacaacgccggcgtggcgccgtccacgccgatcgagtccattaccccggagattgtcgacaaagtctacaatatcaacgtcaaaggggtgatctggggcatccaggcggcggtcgaggcctttaagaaagagggtcacggcgggaaaatcatcaacgcctgttcccaggccggccacgtcggcaacccggagctggcggtatatagctcgagtaaattcgccgtacgcggcttaacccagaccgccgctcgcgacctcgcgccgctgggcatcacggtcaacggctactgcccggggattgtcaaaacgccgatgtgggccgaaattgaccgccaggtgtccgaagccgccggtaaaccgctgggctacggtaccgccgagttcgccaaacgcatcaccctcggccgcctgtccgagccggaagatgtcgccgcctgcgtctcctatcttgccagcccggattctgattatatgaccggtcagtcattgctgatcgacggcgggatggtgtttaactaataaaaaaaagctctgacatggcttgcccctgctttcgcgcaggggcttttttttggtttgtaagtgtaagcatcccggggaaacgaagcatcaatatttgcgggcttctggcgttcctacttgcgcttctggcacgacgtgggcaatctgactgggatgaaggtctgatttgagcgaggagcggaagttcgggaacgggatagctccattgatgactttatgctacgtgttaaaccacaggtaatggagttgctgccggagaaagtagtattctttagactgagatcttttgaaaggaacagtagttgctataaaattgaggaaccaaattctttagcttttaaaaaataaaatattatctcttttagaaattagataagcaggagaaaagctatgatatcggtaataaaggacctatttagtaaccaagtggtttccgcagtcattcttactatcattggagcgattacaaaaaagtatattcagtttcatcgcagagactttttttcacgctcatcctccgagcagataaaagcagtcgaatggcttagaacctcttctgtacccatctccgatccgttagcaaaggcggaacagcagttccgcctacagtcattcggactgcatagagattggcatttatcttataaaatcatatgcttgagttccgattatgcacagtcattgattccgtccttgaaggcagtcttgcgttatcagggcatgtacacaattactaacgggaatatataccctcataaattccataagtggataataccttttgtgttaatatcgttgctattatatatcggtgctgagatatacagaggttcttcacagagtgatggtatagagattttgaaatctctatacgtcgttattgtggcttttatagtatggtgttgggtcgctgcttgtgctctgagagtatcaagcatcagtaaaaagctcaatgcctatatcccacccgcaaacgattttaaatccaagacatacgatttcagttcaatactcaataatagatatccctagcctggctgatctgcttcccgtaaatactgatacctggcagtaagcgagatccgcttctggcacggcgcgaactgttaactgagccaaaggtccgccatgagcgaggagcggacatttttcttcgtcctctacttcgtccattctttatgcagtaacgcatagatgtatgtgtcgtcataccttgccttaccctcctcgttttcaaaggagacaaattctttaaaacatccttcacgtcgcataagtagtcgctcgcatagtttttgagaggagtaattataatcttccacccaggcatacaaacgtctggcgccttttactttaaataaataatcaaacagtgcagcaactgactcgcttgcatatccctgatgttcaaaacgttgattaaaatgccagcctactgaccaggtattgttgtctggttcgttgctattgtccgcaaaaagatgtccgattaacgtatcggtttcttttagacaaacggcaaactgtgttgggtcagaggctcgtttagccacgtcgacctctgcctcagcgagtgaatgtaacttttcatccttaaagcaaggagtacgtggtgaagagaggtaatcgaaaagagctgccgcatcctcttccttaaaatggcgaatgattaatctttgagtggtaatgatggtcataatgtccttgataatgtaatgccagccagttcagcaagaagtctgctttaaactggccggaacacagggcagagattagccgttccggctattccccagtctgtattttcgcatgcctgtaaatcgtgtgatcgtcacgaaaaataccggaacaaaaaaaatggccagtagcgttccgctaatcatcccgccgaatacaccggtaccaatcgcatgctgcgtgctgtcgctggctccactggcaagcatcagcggaacaacacctaatgtgaaagccagagaagtcatcagaattggccgtaagcgtagctttgcagccgtcaatgtcgcgtcaataagactctttccttctttcatcaattgtctcgcgaactcgataatcagaatcgcatttttggcggaaagtccaatcagggttatcagacccactttgaaaaagacgtcattcgtcatattcgtaacggatacggccagcacagcgccgagcagccccagaggaacaacgagcatgaccgcgaagggaactgaccagctttcgtatagagcagccagcaccatgaataccaccagtaccgagagcacaataagacccggaagctgtgatgcagactctttttcctgtaacgaacttcccgcccactccccggcgaaccccggtggtaagtgcttagccagattgtccattgccgccattgcggtacctgacgattttccctgtgcggcactgccggttatgcgtatggcaggatatccctgatagcgtatcagttgctgcggtgcaacattccacgaaagcgttacaaaagtggataacggaagcatctgccccagacggtttttaacagacaaagccaaaagttgttcaggctgcatccggtatggcgcatccgcctggacgataacctgctgaacccgaccattattggtatagtcattaacataattggaacctgctgcaacggaaatggtttgatttatttcatcaaacgaaacccccatggcttccgctttttccctgtcgacatgcagggaaaggcttgttccctcaccaagtccatcaatatagacatcggcaaggtgaggattatgatttgcctgtacaataagctcatcggccgcctttttgagtgcctgatagcctttcccccctctgtcctgtaaataataagtgaacccggatgaggttcccatatcagaaatagccggaggcagcagactcatcgttacggcgtcaggcacgtttgccatttgggaccgaatatggtcagcttcttcctgtgccgtggttcctttgcgttgtctccagtccttgagggtggtgaatgccatggccgaattttggcctgaccctgaaaaaccaaatcccagaatcataatgttactttctaccgcctgccgatgggcgatctcctcttcaaatgtatcgacgaccttaagcgtccgctgcatcgtggcatcagaaggaagctggattgaggacataaaataaccctgatcttcatcgggtaaaaatgatgatggtaaggtggacagcccggcaaacaatgccaaacataatgcagcgtagatcatcatcatacggccagtacgcttcagtacaaatcccagaccagtggcgtaaaacgaagtcaggcgatgaaagtgagcgttaaaccacgctgaaaatacgctgcttttaccctgatgaataccatgtggtttgagcagggttgcacaaagcgcaggcgttaacgtcagcgccaggaatgccgacagtaaaatggatatcgccatcgaaatgctgaactgtcgataaataatacccacagaaccgctggcaaaggccattggtataaacaccgcagtgagcaccagcgtaataccaatgattgccggcgtaatttcacgcatcgcttctcgcgttgcatcctgtggagacatttttttgtcttccatcagtcgttcgacgttctccaccacaacaatagcatcgtcaacaataatccctatggccagtatcattccaaacatggttaaaatattgatggaataaccgcttaatagcattacggtaaatgtgccgagcagcgccacgggtgccacaatcgcaggaataagcgtacagcgtatcttgtgaaggaaaagcagcatcacgaaaaagaccagaaccatggcttcaacaaatgtctcaactaccttcaatatcgatagctttacaaatggagccgtatcgaaaggcacggtgaatgtcattccctcgggaagcacaccggacagttctgttaaccgcgcgcggatacccgacgcagtactaatcgcatttgcgccaggagacaactgaatggcggcagccgttgcaggcacgccattttcacggatgccaaatgcgtaactttgcaacccggattccacgcgggcaacgtctgccagtgtcacccgggcggctgagacctgtgatttaatcgtgatattgcgaaattcttcaaccgaagagagctgcccttttaccgttattggataggtcacctcttgactgctcgtcgcgggttcatctccggttctgcccggtgaaacaatcacgttttgttgactgatggcgcttaatacatccgtaacagagagcccatagctgtgtaatttcatcgggtccagccatatgcggagtgccttttctccgccaaaaagctggactttacctacaccaggtacgcgacggagttcatcagtaacattccttgcaaaataatcgcttaagtcagcttcctgataggctccgcttggcgattttaaccccaccatcattaaaaaaccggaattagctgcctcaacatttatcccattctgtcttaccgactgcggcaggcgagattccacaattttaatttggttttgcagatccatctgggcgagtttgatgtcggtgccgggtttgaaagttaccgtaattgacgccatccctgtcgtgtcactggaagattcaaaatagagtaaattgtcaacactcgaaatttcacgctcgatcagagacacgacggatgtgttcatcacttccgggctagctccagggtaactcactgaaatgataataccgggtggcgcaacttcagggtattgcgcaaccggtaaacgaggtatggacaacagtcccgtcagaacaataaacagggcaataacccatgcgaagatggggcgctcaatgaaaaagtgcggcatcaggtgtacttccagtcaacatacaaagggtaaaagttcagcatggttttcctgataaagaggtctcatcgtcagtcgaaacccgtttaccgatatccctgagctgggaaaatttctcaagaagttgtggtgcgtcatcaaggcttgttgcaaacatccacatataggtcatgacggaataaatatgtccggcattaattccggattccatgctcatcctgataatggtcatggaaaagagagcagaaaccagaaggcctattgataaatatccccatgcctctctgtcggataacaccacgcgcagacgagcaagtgtgtcataatgtcgcttaagagcaccaaaagacgccttattaacataatcgacctctttctcaaggcgattattcagccgtctgtagaatgtctcatttttgctggggaaggtgcgaacaagttcctgatatgagatcatcatattcatccggagcgcatcccagagggacatcatgagccatcaactcaccttcgccgatagtgaattcagcactaagcgccgtcagacccgaaaagagattttcctctcccgcatggagcagattctgccatggcaaaacatggtggaagtcatcgagccgttttatcccaaggcgggcaatggccgacggccctatccgctggagaccatgctgcgtattcactgcatgcagcattggtacaacctgagcgacggtgccatggaagatgccctgtacgaaatcgcctccatgcgcctgtttgcccgattatccctggatagcgccctgccggatcgcaccaccatcatgaatttccgccacctgctcgagcagcatcaactggcccgtcaattgttcaagaccatcaatcgctggctggccgaagcaggcgtcatgatgacccaaggcactttggtggatgccaccatcattgaggcacccagctctaccaagaacaaagagcagcaacgcgatccggagatgcatcagaccaagaaaggcaatcagtggcactttggcatgaaggcccacattggtgtcgatgccaagagtggcctgacccacagcctagtcaccaccgcggccaacgagcatgacctcaatcagctgggtaatctgcttcatggagaggagcaatttgtctcagccgatgccggctaccaaggagcgccacagcgcgaggagctggccgaggtggatgtggactggctgatcgccgagcgtcccggcaaggtaaaaaccttgaagcagcatccgcgcaagaacaaaacggccatcaacatcgaatacatgaaagccagcatccgtgccagggtggagcacccgtttcgcatcatcaagcggcagttcggcttcgtgaaagccagatacaaagggctgctgaaaaacgataaccaactggcgatgttattcaccctggccaacctgtttcgggtggaccaaatgatacgtcagtgggagagatctcagtaaaaaccggaaataacgccagaaatggtggaaaaaatagcctaaataggctgattcgatgtgtttgcgggaaaaaaatcggcccagatccgcgaaattttaatcagcgagtcagcttgggaagaaatgacctgcttattcgcaccttccctaacctggatattatttcgaggcagccgccgatcagtttcccgctaaatgtcagagaagatgtaacaccatcaaggcgtttccactgtgttttttgggtcagattgaaacctccgtctgacgctgttccccattgattttcatccgcttgaaatgctgttgaagagtactgtttgattacagttccccgattcgattccagaatttcccatacggcctgagtggtggcatctaacttttgagcgccaagatccatgaggtttggcccatgcaaagtagcccagcccgatatcgtcgtcagtgggaaatgaagtgtactcagatctgaaaagcccacaaaccattttggtttagaccgggacaacagatcaaaatcaatcaaatcaagcaattccatcgccagatcaccgccccaaggtggcataacagcttttatatctgggtcagtaagataagacattaattcttcaacgcgggaaaatttagtggcgcttttatttttgtgctgcgagcgtaagcagcgtccttcgcggacctggtaacctcttttctttaggttttttatggcgagttccagtctgggatgcagatgttcaggtacgccagcagagggagcggttacaccaataacatctcctggagccagcctgggtggaaagaggacactcatggatagatccttttcagaacatatagaattccataatctataaataaagccaggatgtaaaattaacaggcgaacactccgcttgttttttctatgagcctttaaaaggtctgctcatggcacccaagggactttaccggcgtagatgatgcgtcaggcgactaatcctcaaaagtgcttactgcttattcgcgggaccgccggttgatttgggttggctcatgacgactactcttttagctattcccggtttccccttttcaaagcgccatttactcatcattttctcgatgattttatgttcaaactccggagtcgttgtcgattccagtatctttacattctgaactctgccatctgaatcaacatcatactgaatccgcagagcattcggcaggaggtttccgttattatcatgagtggtaattgctgtgtttgcagaggaaatgctgcctgaaggtgtgctggcgctggccggtataccggcgcagagtgccaggaacaatggcagaatcagggtgaatagtctgatagcttgcataaatcgtccgaattccaaaattaaccatgaatcttcacgttaccaacggtgcgagtgacaggctgccagatgaaatgatcagtgaataccgcgtcttcagctgcaatccctttgacctacttaccaggcgcttcgtaccacatccattcccggggtcgtttcgctatcaggactagtgggagctgagcgagtatatcaacgattcttttgccagctgccagcagcgctatccggttcgtcggggaacatgaccgagctaacaccctcaagtgattagcatttattcgcgtcccgcgctgaagacgttcagctaatcctttttgacttctgtgttcgggatctaccgcggttgcgacgttaagagggtgttctccgcgggcttagcggcagcttgctgctgatgctaagggggagattcttcagtcatttctgcgacaccggggaacttaacccggaagcggctgaacatagcgccagcagggaggatcccggatagctgtgcgtgacgccttatcccggctacgctgttgtgccgctcttgtggcgtatttttgccgggtggcggctgcgccttacccggcctacaaaaactcgctagctgactgactggctcgcgccgcgttgagtgttacatagtgatgccagctcttcctgctcctggcattgagcggacaaaccagatgagccaaaggtccgccatgagcgaggagcggaaatttgccacgcccacaactacgttactaacattgaggtgtcgtaatcaacggagagcaggtcaaagtcattttagctgcatcaagggataagagttcgtggtactggaaccgtcagtatagagctcggtaataattatttttttaccatcaatagaatatttgactgtactgtccgcaggatcatcccgccagcgaccggtgctgtcagggttatcagatgcccacataacctgatcacctataagtttacactttattgcccaacgggtgccatcgttctgtcggatataatgtacgtaggcaatacctgattccactttatccagttgcatgatcttatggtcacggccaaacatcgcagcagaagccgccttgcaaatctgacctaccgtgacttcagaagcctgtaccggcgcagtaaacaccagtggaacaagaagtgaaagttctttcattcggctcaatccattttgtttattttcaggaataacgctaaatgggtgatgctaccaacttgctgatttagtgtataatggtgtttttgaggtgctcccgtggcttcagtctccgtctgctgtccctcctgttccgctactgaaggcgtgatgcgtaatggcaaaagtactgccgggcatcaacgttatctctgctctcactgccgtaaaacatggcagctcaccttcacttatgccgcttctcagcccggtacacaccagaaaatcattgatatggctatgaacggcgtcggttgccgtgccaccgcacgactaatgggcgtgggcctcaacaccattttgcgccatttaaaaaactcaggccgcagtcagtaacctcccggatacagccgggcagtgatgtcattgtctgtgcggagatggacgagcaatggggctacgtcggtgcaaaatcacgtcagcgctggctgttttacgcgtatgacaggatacgcagggcggtggtagcccacgttttcggtgaacgcactatggccacactggagcgtcttctgagcctgctgtcagtttttgacgtggtggtatggatgacggacggctggccgatgtatgagtcacgtctgaagggaaaactgcacgtcatcagtaagcgttacacgcagcgaattgagcgacacaacctgaatctgagacagcatctggcaaggctgggcaggaagtccctgtcgttctcaaaatcggtggagctgcatgacaaagtcatcgggcactatctgaacataaaacactatcagtaaattggagtcattacccgctaaatgtatatgtcggcaatctaaagcgtttcttgacgctaatctagtgttgcgatggcaggattgattaacttagtccctagcgtaatcccatgctctgcctgattgccagcttggctcctttggcacactccacattgcgattcatacagaatgttgttagccacttccacacttgaggacagaagaaattcatgctcagcaaggtccgggcggtgcaaagagcggacgttaattttgaagcttttaagatctacctgcagtggtaactgggcatattgatcattgcgattagacagcgaaccactatcccaggagatttatagacatttccatgcagcgcagttcagcctgcgccaaggcagagggatacatgctttcctgcataagtttgaaaccatgtttctcataaaaagtctgggcattaggtgttgaggacaaagtcaattgctcaaaaccacgtccacgagcttcacttttgatggcttcaataatctgactacctaaacctttacctgtatattgaggtagcgtaaatacagcctcaatacttcctgtagatagatcaagatagcctgtagctaacagtctgccatcaggggcagcaacaacgaaaaaaggattcactacaatggcgttcctgtagctctcaggcattttttccggtgtccaggctgcaataaccgcatcatcataactactcttacatccgtaacgtatagcctgatttcgaatgttccagcattcttctgcctccacaggcacagcaagtctgatcttcataccttttccttgtacgttttattctgcgaaccatttacatctaccataaaaattctaaagcatacccatcaaatttgagtgaggcggcaacgtccgctcctggcacacagcagacatgaaattctggaatagcattcgtacacttacaacatcgagaggcttctgaaagccgcgtcagcggcatgacagcgccagcagagaaaatcccggatggcggcgtatggcgccttatccgggctacgctctggtgccgtatttttgccgggtggcagctacgccttacccgacccggtgatttggcgctcaattcgcgcccttcgtaggcccgcgcaagcgtagcgccgccgggcaagggcagcgggtgcggagccggttttgtgccgggtggcggctgcgacttacccggcctacggtccgtgcgacttgtcgttaatttattcaccattgttgctgaaactgccggtgttgcggcctcaaaatcgctgagacgttcccggaaggccggggcagcccgcatggatgcgggctgagggccgtgttttgcacggacgctgcctcggcccgacccgaagcctgcagggataagtcgaagggaccgcgtagcggcgattttgctggccggagcccgggggtacagggggcggcggcgactggccgccccctgtgcgctccctgcgccatgccaggcataacgcagaagattaaccgggagcgcaaaatacgctgaagccacagataacataaaagacttcccggcagtgctttccctcacccaggccttcttccggagggagagagaaccgtacggcagtcgttgccgttccatgacgctccctgcgccacggagaaccaggtgcagcaccacgaagcgggagcacagagtacgctgaagtcacgcgtgagaaacgctttcccgggctgagaaccaggaaaaccgataaccgtctccggcaagaaatcaggctccgagcccaacatgttgccgggtggcgcttcgcttacccggcctacaaaggctacccgcgatttggcgctctattcgcgcccttcgtaggcccgcgcaagcgcagcgccgccgggcagttactgcgcctgctgctgcgcctgcgccagctggcggacgatcgcctcgcgccgcgcatccccttccggtagccgggccagcaacgcctgcagggccgccacggcctcggggtaatcttcattgcgcaccgcgctcagggccagcatctccagcaccggcaggctgttcggctgccgctgatgcaggtcacgcagcagcagctcgcccatccgaacctgaccgctatctcccgcccgcaccagcgcgctggcgtaatcgaaagccgctgccgggtcgtccgccgccagagcatgcgcccggccaaaggcgccgatcgccgtctcgccatcgtttaacaacaggcccagccgcccaagcagctgccagccggcgaggtcgttcggagtatcctgcaggtggctgcgcaggccaagccgcagctccgccagctcatccattcgcagcggcgccgccgtcgggtccttaacctgctgcaacagcgcaggaaaatgtcgttcagcctgctgccagagcagcacctgaccaatatcgctggttttcagatacaggcccagactcaggaccaccagcagcagcgcgcccggaagcagcgcccagcggcgtagcggccgttcgccagactgtgcctggggcggaatatccgtcagcagcgtgcgctgcagctcgacgaccagcgccgggttgtcctcgccgcgctcctgcgccagctcctgcaggcgcgactggtacagggcgcggttgagggcatcgcggtctaccgcccctttgcccgaccacgggaagtacagcagccccagcgcgccagccagcagcagcgcgacgataaccaccaacaggctcatcgttcttttccttcttgcaataatgccgccagccgctggcgctcttcggcggtgagtgccgcgtcaggaatgtcgcgacggcgggcgcgggcgataatcactcccgcgcccgccagcacgaacaaccccggtcccagccacagcagcaccgtgcccgcggtcagcggcggctcatagctgacaaaatgaccgtagcgggccaccatatagtcaacgatctgccctttcgttttaccctgctgcatcagctcgtacaccttctgccgcatatcagcggcaatcatcgcgtttgagtcggcgatgctgttgttctggcatttagggcagcgtagttgggaggtgatctcgcggaaggcctgctcctgggcctcatccttaaactgccaggtatcgatggcggcccacgcctggccggtcagcatcagcgccagcaggatgaccattacccctctcatcaacccgccctccggttgtattgatcccacagcggctggagctcctcgcgccacacccgttcgttcaggtcgccggcgtgccgccagcggataatgccctgaccgtcgatgagaaacgtctccggcgcgccatagaccccgagatccagaccaagcatgccgttgccgtcgtagaggctcagcctgtagggattacccaggcgctgcagccagctcatcgccttctggcgatcgtctttgtagttcatccccaccacccgcacgccctgctgcgccaggccgttgagaaactgatgctcggcgcgacaggttggacaccaggtggcccagacgttgagcagcagcggcttgccgtcaatcagcgtccgtcggtccagcgtctgaccgggggtattcagcgcttcaaggcgaaattccggcagcggtttgccaatcagcgccgactcgagggtcgtcgggtcatcgccatcggcgttgcgcatcagctgccagaacagcgcggcggccagcgccagaaacagcaccagcgggataaacagtagcttccggttcatgaggcctcctgcagcttcttacgcatccggtagcgcgggtcgagcatgcagcacagaccgccgagggccatcagcaccccgccgtaccagatccagcgaacgaacggtttatagtacagacgcaccgcccagctgccgtcgctcagctcttcccccagcgcggcgtacagatcgcgggtcagcccgccgctgatcgccgcctcggtcatcatcatccggctggcggtgtaaaagcgcttctcagcatacagcgtcgcttccgggcggccgttgcgggtcacggcgataatgccttcgccgccggtccagttggggccgacgatattgcgcacgccgttaaacacaaagtgatagcggtggatatcgatgctgtcgccgggacgcatccgtacatcgcgctccacgctgtagttctggctgaaagtgatgccgataacggtcaccgccacgccgacgtgaccgagcaccatcccccactggctgcgggtcagggcgcgcaggccgcgccagaaaccgtggcggtgggtggcccgttcgtgaacctccagcagggcgaagatcagcacccacagggccatcatcaggcctatgaccgccatggcggtgatacggtcctgcagcagccacggcagcgccagagaaagtgacaacgtcaccagcagagcgataatcaggcgcttaatctgcctggcgacgtcatcgcgccgccagcggatcagcggtcccagccccagcagcagcgcaaacggcgccatcagggcggtgaacatggtattgaagaacggctcgccgatggagatgctgccgaggcccagctctttatgcaccagcggcagcagcgttccgaggagcaccaccagcatcgcggccatcagcaagatattgttgccaagcaggaacgactcgcgcgaccacagcgtatgttccacccgcgcccgcacccggccacccttcagggcgtacagcagcagcgatccgccgatggcgacaatcagcagtaccagaataaacagcccgcgcgacggatccgaggcgaaggcatgcaccgaaaccagcaccccggagcgcaccaggaaggtgcccagcaggcacagggagaaggcggcgatggccagcagcaccgtccaggcgcggaagctgccccgcttttcggtcaccgccagggagtgcagcagcgcggttcccaccagccacggcataaacgaggcgttttccaccgggtcccagaaccaccagccgccccagcccagttcgtagtatgcccacgccgagcccagcgcgatgccgagagtgaggaacatccatgccgcctgggtccagggacgcgaccagcgcgcccaggcagtatccagccggcccgccagcagcgaggcgatggcgaaggcaaaggccaccgagaagccgacgtaacccatatagaggatcggcggatggaaaatcatgccgatatcctgcagtagcggattgaggtcgcgaccatcaatggggtactgcggcaggccgcggctgaacggattggaggtgaagaggataaacagcaggaaaccaaaggcgatcatccccatcaccgccagcacccgggcgacggcgtcgagcggcatccggcggctgaagatggcgacggcaaaggtccagacgctgagcagcagaacccacagcagcagtgagccctcgtgcgccccccaggttgccgccacccgataccacaccggcagcgcgctgttggagttttccgccacgtagcggacggtaaagtcattgaccacaaaggcgtgcaccagcagcaggaaggcgccgccgatacaggcgaatagcccacaggccagcggccgggccagggccatcagccgccgatcctgccgcgccgcgccccacaggggataaacgctcaggagcagcgccagccccgccgccagacacaataaaaagttgcccagttccggcatcatggctgcgcccccgttttctccggcgtcatggcgtttttcacctccggcggcgtgtaattttcatcatgtttggccagcacctgctgggcggtaatatgccgctcgccgtccagtacgccctgggccaccacgccctgcccttcacgaaacaggtccggcaaaatgcccttatagctgacgtccaccaccccgcgggcgtcatacagcttaaagcgcacgtcgagggtttgcgggtcgcgctgcagggagcccggctgaacgtagcctcccacccgcaggtgctgcccggtatggggcagcgcccgggtttccgttttgccgtagataatttcccccggggtgtagaacagatcgatattgctactcagggcgtacagcgtcaggctgacggttagcccgaggccggcgagcaccgccagcacgatatatagccgggttttacgacgcgcttgcatccgcggcctccttgtcatgttcgcgggcggcagcgatccgccgctcgcgcgcctgctggcgtcgcacctcatggaacagcgcccgccgcgcccacagggtatgcaccgtcagcaggccaaaggcggcgacggccacggccaccgccagccagacgtacacggcatagccgcccatattcaggaaggcggcgaaagacgaaaaggcggggctcatcgggcggctcctttattcaccagcgccaccacccacggtcgacggcgctccagttgcaggatcaggttacgcaggcgcatcagggtcagggtgaccgacagcgtgaggaaggcaaagatgcagatccgcagcggcagacgcatgcttgggtcgatggtttgctgcaggttggtcgagccctggtgcagggtgttccaccagtagaccgagtaatgaatgatgggcagattgaccaccccgaccagcacgaggatccccgccgcgcgcccggccagccgccggtcgtcaaaggcgtgccacagggcgatgaccccggcatacagaaacagtagcaccagctctgaggtcaggcgggcgtcccagatccaccaggtcccccacatcggcttgccccatgccgcgccgctgaccagcgccaccagggtgcagaccgcccccaccggcgccagggcggcgatcgccagatcggccattttgatctgccagaccaccccgacgaaggccgcgacggccatcgccaggtacagccccatcgaccacgtcgccgccgggacgtgaaggtacatgatccggtagctttccccctgctgatagtccgcgggggcgaagccaaagccccaccccaggccgatgaccagcaacagcgcgctcaacgccgccagccaggggatccagcatccgcacaggcggtacagccgctcggggatcgccagttgatgtaacgctttccacatagacgcttactcacacggttatgatggccgcgcccgcaggcgcagcgagttatcgcacggtcagccgcagcgcagcggcggtggcgaacggacacagggtggcgctggcggttaagaacgccgccagcatcgccagatagccgctgaccgggagcccggcggccgccgcctggcaggccgcggtggcgaaaatcagcagcggcaccgccagcggcagcaccagcaggctcagcaggacgccgccgcgcttcaggccgaccgtcaggccaacccccaccgcgccgagaaaactgagcgtcggggtgccgagcagcaaggtcagcgccagcacaccggcgtcatgcagactcatccccagcagcagcgccgccagcggcgagacgatcagcagcggcaggccgctcatcatccagtgggcaaccaccttcaccagcaccaccgccaccagcggcgtcggcaggagcatcagttgctccagggaaccgtcctgccagtcgtcgcgaaacaaccgatccatcaccagcagcgccgccagcagcgcggcgacccacaccacgcccggcgcaatctgcgccagcagctgcggcgcggcgccgacgccgaacggaaacagggtgatgacgatcagaaagaaccagagcggattgaggatctccgccccgctgcgccacgccaggcgcagttcccgggccaacagcgcacacatcattgcccgcctccagcgtcgccgccgaggcgcagggtgcgcaacggacagcccagcggccgcagcggctggtgggtggtgaggatggcgcatcccccctgccgggcgtgctgctccaggcgacgggtcagggtttccatcgccgtggcgtcgagggcggtgaacggctcatcgaggatccacagcggcgcgtcggttaaccacaggcgggtgagcgccacccgacgctgctgcccggcggagagctggctcaaggggagatcttcatagcccgccaggccgacggcggcgagggcgctttcccgctgctgaaggcggctggccggaaagaagaaacgcaggttttcatcggcggtcagcgccgcgttaacgccgggtttatggcccagccacagcagctgacggtgaaatgactcccggaccttcgccagcggcaggccctgccagctcaccaccccgctttccgggcgcgccaggccgcagaggatccgcagcagcgaggttttccccgcgccgttatcaccggcgacctgcagcagctcgccggcagcgagggacagcgtcagcgccgcaaacagcggtcgatcgtcaacgatgcaggtcagtcgctctgcatgcagcatgaaggcaaactccttgattcagacagtattttacgtcgtcgctaagtatgggttgcgccgcgcgggcgacgcaaccctgacggttactgtccggcccccggcagcttcgagatatcggcgttgcctaacgccttctcatcgtgcgccgcggtctccttacgcaccttcgccacatcgctggcgctgaccgccggcgcgttgttgccccagctggtgcggatgaaattgaccacatcggccacctgctggtcgtccaggcgccagccgaacgacggcatggtcaggttggagaccgcatctttcaccgccggcgtggtgctcccggtcagaacgatgtggataagcgaagtggcatcttccgtctgtaccaccgggttgcccttcagcgacgggaaggcgcgtttatagcccgcgccgtcggtacggtggcaggcggcgcagttatcgacgtacagcgcggcgccggttttgctgtcgttacccttccacagatctttcgccacgctgtcttccaccggggctggggtctgtttgccgccgcgcggcgggagcgacttcaggtagcgagcgatggcggtgatgtcatcatcagagagatactgcagactatgctccaccacatcgctcatgccgccgaagaccaccgatttatcgttgcgtccggttttgaggaactcggccagctcggcttcgctccaggtccccagaccgtcgcggttttcgccgcgcaggctggaggcgacccagccgtcaatcggcgcattgctgcccgccaggtaatcatcgccttcgctttcgctgagcgctttttcctgcatcgtcaggctacgcggggtatgacaggcgccgcagtggcccaggccttccaccagatagcggccgcgctccagcaccgggtcaacctgcgggttggcgacaaagtcgctcggagtcggggcgaagatgccgcgccagaacgccagcggccagcgcatcgacagcggccatgggatgtcggtgtccttgttggcgacattcaccggctccacgccgtgcataaagtaggcgtacatggcgcgcatgtccgcttcgctgatccgcgcgaacgagggatacggcatcgccggatagagcgtggaaccgtctttccgcacgcccttgcgcaccgcgtcgtcgaactcttcgaaggtgtacccgccaatgccgtgttctttatccggcgtgatattggtggagtagatggtgccgatcggcgtctccatcggcaaaccgccggcgaaaggtttccccgctttgccgttggtgtggcaggcgacacagtcccccgcccgcgccagatactccccctgcttaatcagattgctgtccgcaggcgcctcttcggcaaaagccgcgcagctcaatgccccaagcaccagggccgataaccattgcattttcatcatctgccttcctttatgcctgcaccaggggacccggatttttcagatactgctcacggatcgccttcgctgaccagtaggccagcgcggccaccgtgccggttgggttgtagcccagcccctgcgggaacgcggaggcgccgatgacgaagacgttatgcacgtcccagctttgcagataacggttcacggcgctggttttcggatcttcccccatcaccgccccaccgttcatatgggtggtctggtaggtggtggtatcaaagtggctgttggcgtttttcgggctgccgaggatatatttcggcttcatcgctttggcgatcggcgccatcttatcgaacataaactgcgccatcttgatgtcgttttcctgccagtcgaaggtcatgcgcagcagcggctggccgaagacgtttttgtagttcggatcaagatcgaggtagttctgccgataggactggtgcgcgccgtgggcatccatcgacaggtgatgggtgtaggtgtcggccaccgccgctttccacttgctgccccacgccggggtgcccggcggtaccgggaaaccggagatgggcttggtcccggcctggttgacccagaacggcgaaccgccgacaaagcccgccgcgccgtggtcgaagttgtcggcgttgaagtcgtcgacgccgacgccgttgccgcccgcgccgataaacggattggtataggtgtctttgtcgaaaatggccttgatggtggtcatgttctggtaggcgaagttacgccccaccaccccttcgccggtctccggattgtacggtttgccgatcccggagagcagcatcaggtgcacgttgtggaactggaaggcgccgataatcaccaggtccgccggctgttccatttcgcgcccctggccgtcgacgtaggtcacgccggtggcgcgggatttgtcgtcggtcaggttgaccttcagcacgttggcgttggtccgcagctcaaagcgtttttcctggcgcagcgccggcagaatgttcacgttcggcgaggctttagagtacatgtagcaggcgtagccgctgcagaaaccgcagaagttgcacgggcccatctgcgcgccgtaggggttggtataggagtcggaggtgttggccgacggcaggttataggggtgataccccacttccagcgccgctttttcaaacagctgcgccgaccaggtgtttttctgcgccggcagcgggaagtcgtccgagcggtccggggcgaaggcgttgccgccgcggcctttgccgacgaccttgcctttgatcgaccaggcggtcccggaggtaccgaatactttttccgctttatcgaagaacggttccagctcgtcgtaggtgacgccgaaatcctggatgatcatatcctgggggatgaagtttttgccgtagcgttcttcatagtggctgcgcatccgcagctcaatgggatcgacgcggaaatggacgccggaccagtgcagcccggcgccgcccacgccggtacccggcaggaaggccgccagctggcgatagggcaccgcctgttggctggtgttatgccggatggtgacggtgcttttcgatagatcctggaacagcttgcggcggatgttgtaggtcagctcatcaatcacctgcggataggcgccgtccggccaggtgtcgcgcatcgggccgcgctccagcgcgacgacgttgaggcccgcttcggtcagctctttggccatgatcgccccaacccagccgaagccgacgatcgcgacatcggtttttttcaatacggtggccatgattacgccctctccccattaattgataccggcgggaaggggtagcgttcgccccgttcaacccagtccataaagtcggcgcgcgcgccgggaaaattaatcagcgtccagccgaccatgcctttattgccgccatggatcgggtcgctgaagaacccttcgcgggtgttttgcagcagataggtgaagaacagcgaggccggcagctgtttgaactcggctttacccgattcccacaggccgagcgcctcgtcctgctgctcgctgctcagttcagcgaaggttttatgatatttgtcctgacaccacgcctcggcgtcggcgatcccgaggttatagatctgtttgggcaccaacggcagctgataacccatctctttcggcacgtcgggattgaagggcccctgcatataccagatggagccggtggcgtaaggggtattgagctggcggtcgataaactccgggacgccggcctctttggcaccgggaccgagttcatccgccgggattaagcgagcgacggcggcgttgataaacgcccactcacgatcgttgaagaactgcggcttccagtcgctggccgccgcggtgttcccggaggctggctctgaagcgggggccgcctgcgcggtcgcgctggtggccacgccaatagcccctgctcccgcgccgccgatcaccaccgtcgggatcagcgccatcgatttcaccaggaaatcacgcctggaattgttggttttctcgctcgacatcatcacattcctgtcattgaaaattactgtttttgtcgctgacaaaaccagtgaatgtcgtgctggaaccgataccattgcgcttttaaaccgcttagcgtctggcccggcccggcaagtcggataaaacatcgccagaggcgatatcatttatagggttatcgtttggatagtagacgattctcaacgaaacgcggaaaatcggagagaaattcaccggtctgtcatcgtgagaagagtgctgccataaccttgaggcggtaaaccagcggcattcacaccgcgctgagcttacccatgcgccaaaaaagagtgacttgtatcacaaatgttattttttgtttatggtacatggcagattaaacgtctgtaaatactcgtattaggaataattaaacattttgagctgttaaaaaagttaataaccgttgttaactatcttgtatctattgtccggctagcgccttcagctggtgatatcccatccacaggagaagagaagatatgttcgatcatgtgaaattcggcgttagcgactatgccgccagcaaagcgttctttttgcaggccctggccccgcttggcgtaacgctggtcggcgaaggcgaaccgagctacggcgcagagctggccggcagcggcgatgcttctctatgcctctatcaaagtgcggaaaaaccggcgccgctgcacattgcctttcgcgccgacagccgcgagcaggtcgatgccttctggcaggcggcgctggccgccggaggaaaggacaacggcgcgccggggctacggccaaactaccacgccagttactacgccgcgtttgtgattgcgccagacggacacaatattgaagccgtgtgccatctggcggggtaacgggcggctaccgctgcggaaaaatccacacatcctccgccgggagcgtcagatggcagtgttcggcatcgcgcagcgccgttccgtaggcgcgcagcggaaagtcgtcgccttcggtacggaacaggtactcccaacggtcgccgaggtacatgctggtcagcagcggtagctggaggctattatcctgcgcggcgccgtcaagttgcaggcgctcgacgcggatcaccgccgtcgccggctcgccaacgctaaccccctcgcccgctcgcccccacaggctccagctggcgccttcgatccgcgccctgccgttctccagcgccatcactttgccgtgcaggcggttattgctgcccataaactcagcggcgaacagcgtcgccgggctgccgtacatctcctgcggggtcccctgttgctcaatgacgccattgttcagcagcaaaatacgatcggagatggccattgcttcattctgatcgtgggtgaccatcagcgccgacaggcccagcttaatgatcagctcgcgcagaaacacccgcgcctcttcgcgcagcttggcgtcaaggttggagagcggttcatccagcaggatcaccggcgggttgtaaaccagcgcccggccgatggccacccgctgctgctggccaccggagagctggtgcggatggcggttgccaaggtgccccagccccagctgatccagcacacgctgcacccgctcttttatctccccggcggcgactttacgcagcttcaacggataggccacattgtcgaacaccgttttgtgcggccacagggcataggactgaaagaccaggcccaggttacgctcttcggccgggatctcgctgcgcggcgtgccgtcgtacaccgtgcggttgccgatggcgatccgtccgctcgtcggtttttccagcccggccaccgcccgcagcagcgtggttttgccgcttcccgaaggccccagcagcgatactacctccccccggccgagcgtcatggacacccccttcaacaccgggttatcgccataggtgagatgcagattttctaccgataactcaatcatgtaatttcactccaaagcgcagggcgatacccaggccaatcaccaccagcagaatattgataaaggagagcgccgcgacgatatcgatggcccccgccgcccacagcgacaccagcatcgagccgatggtttcggtacccggcgacagcagatagacgccggtggaatactcgcgctcaaagatcaggaacatcagcagccaggagccaatcagcccatagcgcgacagcggaacggtcacgtggcgggtgatctgcccccgcgaggcgccggtgctacgcgccgcctcctccagctccgggcccacctgcagcagcgtcgaggagatgagccgcaggccgtaggccatccacaccacggtgtaggccagccagacgctgaagatggtgttgcgcagggcgcgcagctgcacgataaggtgctcccgcagccagtcggccaccggcagcgccgagagccagccgtgcttcagcgactgatcgagccacatcggtacaaacaggaatacccacaggaaggccaggccggccagcagccccggtaccgcgcgcgggaccagcacgctgtagtcgagaaagcgggtgacgttgtccgctttgcggtgcatggcgatgccgacaaacagatagcagatcaccgccagcgcgccgccgatgatgccgatagccatcgagttgacgatcgcccgcagcaggttgggctgctgccagatattgtggaacgtcgccagcgacagctcatcccacagcgacacgccgacgccccagttggagataaaagcgcgcagcgccacgccgagcagcggtacgccgatggtcaccgtcagccaggccaccaccaccgccccggccacccagcgccatttgcccagcggcagcgcccgcgcctgggacgccttgcccttcatggtgacaaagcggttggcggtgcgcatcagccgccgctggagcatcaccagcgggatggtgatgcagatcagcaccaccgccaccgccgccatcagatggtaggagggggtgccgagcttgttagtcagcttgtagagataggtcgccagcaccatgttgccctcggggtcgcccagcaccagcatcagaccgaagacttccagaccgaggaaaaagagcaacacgcaggcgtaaagaatggatggccgcaccatcggcagactcaccgaggtcatcacctgcagcggcgtggcgccgacggtgcgcgccgcctcttccacgtcggagccgacgctgcgcagcgccgaagagatatagagataggcatgcggaacgtgagttaagccggcgatgaccacaatgctgaacatcgagtagatattccacggcacaaagccgatcagctgctgcgcccactgggaaaagaagcctaccggcccggcggccaccacgtagccaaagcccagcaccatcggcgagacgaagatcggcaccaggatcagcggctcaatgatccgccggccgggtaaatcggtgcgcaccatcagaaacgccaaaataccgcccagcggaatggcgataatcaccaggccaaaggccagaataaaacctgaccttaatgccagataaaaatccgggtcggtaaaaataaaggcgaaggcttccagactccacgatttggagcgggaaaagaacggtgccgagagaaaactctgcaccacaataaataacagcgggacataaatcaccagcgccgtgatgcacaccaccacgccgcgcggcagcccctgccactttctgcgtaatacgttcatggttcatcccttcggtcaggtgaataaacccgccgggtgtgaataaggggcatcggcgatgccccaaaggaggattatttcgcggcggcgctgcgccattgtttaataaactgcagacgtttttgcggctgtaaataatcgagcagcgtttcgttgaccgggatcggttttaacgctttgcccaacagcgcggtcataccatcgatatcatttttacctgcaatatcgcgacgaattgagggaatatccgcctggctggcgaggatctgctggcctttttccgacaagacatagtcgagccacaattttgccgcattgggatgttcgctctcctggctaataaacgagacgcgggagagcaccagcacgtaatctttcggataggcaatacctaaagagggatcgtttttcgcccgcgcttcggcataagagccaagaatgttatagccgatcaggttttcgccggaggagacgcgctccatcattgtgccggtggaagactgcaccgtcaggccgcctttggcgatattcgccaggtcggcaaaatagttcgcgtcggcctggctgtcctgtaccgccagcataaagccgaggcccgatttttcgatatcgtaggtggtgactttgcctttaaatttatcggcctggctggcgataagttttgccagcgcggtatgcgaatccggaacctcattctgcgggatcagccgtttgttatagataaacaccaccggctcataggtagtgccataggctttttgctgccagaccgcccagtcgggtaattgcttcacctccggcgaggcatattgttcggcgtattcggtggctaatttcagcgcggtatccatcgatgagctccacaccacatccccgctgccgcccccggcggcctgttcgctgatatagcggttatacagctcagtactgttcatgtcgttatattcgactttgacgcccgggtattgcgcttcaaatcccttaattaacggcccggccgctttggtatcggtcgtggaatagatcaccaccttgccctcttttacggcggcatcaatcgttttttgataatccgcgggatagcccgcaggcacctccgcccaggcggcacaggcgaaaacggccgtcagtgaaaccactaaaccacttattttcttatacatgataccaacctttaatcatcaattaataaacacaaatttaacatatagtggtatcagctccccttgcaacgacggggatggcttttttctggcttttgtgacactggcagaatttaaaaatgtggtgtttatggcgttaattaaaacgcgatcccggcccggttttttatcgtctgtcgtatgcgcaggcgctggcgcagcggcatgtcgccgggagacgccgcccttgaccttctgcgccgggcggcgcagcataaaacggcaaacataacaaaataacaacagactacaggagagaatcagtgcctacaggacaccgctttctggcgacggatctgcatcagtttgtcgtctcactgtttacccatctcggcagtaccccaggggaagccaccctcgtcgcggaccatctgatcgccgccaatcttgccgggcatgactcccacggcgtcgggatgatccccagctacgtcaaatcccacgccggtggttttctgcagctcaaccgccacgccacggtgaccaaagacgccggcgccgtggtcaccctcgacggcaacgccggcttcggccaggtggtcgcccacgaagcgatgcagttaggcattgaaaaggcgaagcagcatggtatggcggctatcgccctgcgcaatgcgcatcacgtcggtcgcatcggctactgggccgaacagtgcgccgccgccgggctgatctccattcacttcgtcagcgtcatcggcgacccgatggtcgccccgttccgcgggaaggacagccgcttcggcaccaacccgctgtgcgtggtgtttccccgcgcgggccatccgccgctgctgctggactacgccaccagcgccatcgcctttggtaaaacccgcgtcgcctggcataaaggcgaagccgtggcccccggctgcctgattgacgccgagggtcgacccactaccgacccggcggtgatgcagacctcgccgctgggcgccctgctcaccttcgcccagcacaaaggctatgccctggcgacgctgtgcgaagtgctcggcggcgcgctctccggcgggcaaaccacccatcaggagagcctgcagaccagcgtcgacgccatctttaactgcatgactacggtgatcctgcgcccggacgcgttcgatgccccggacagccaggcacagacggaggcctttatcgcatggtgtaagcagtcgccgcacgatgccgatgccccggtgctggcgcccggcgaatgggaggccgccaaccgcgaagcgcggctggcgcaggggatcccgctggatgccggcagctggcaggctatctgcgccgccgcgcgcgacgtcggcctgagcgaatcgcacttcgaccgctgccgccctctcgcctagccgcgttttactcccgcagagcgtctgacgtcggcgctctgcgtcatcgtcattagtgacgaggtcatgctcccgtcatcaatctcttttcatttttcaatacagatcaagggtttaaattctggcacaagacctgcatagcgcaacaggcctgcgtctgcatcaccaccaggcgataccgcgatcgttgcccgtcgggcccggcgcgacagcgatcctcagttcactgttaacaggtctgttactgatgaaaaaaatcacgagcgtgtgcccctactgcggggcgggttgcaaacttaaactggttgtcgacaacaataaaatcattcgcgcggaggccgccgacggcgtcaccaaccagaaccagctgtgcctgaaaggctactacggctgggattttcttaacgatacgcagctcctgacgccccgtcttaaacaaccgatgatccgctaccagaaaggcggcgccttcacgccggtcagctggcaggaggcgattcgctataccgccagcaagctcagggagatcaaagagaagcatggcccgcgcgccatcatgaccaccggctcctcgcgcggcaccggcaacgaaaccaactatgtgatgcaaaagttcgcccgcgcggtgctgaacaccaataacgtcgactgctgcgcccgcgtctgccacggcccctccgtcgccgggctacagcaggcgctgggcaacggggcgatgagcaactcgattagcgacatcgaaaactcgaagtgcctgctggtctttggctacaactgcgccgactcccatcccatcgtcgcccgccgggtaatcaaggcccgggacaacggcgccaaaatcatcgtctgcgatccgcggcgcattgaaaccgcgcgcattgccgatcgtcatctgcagctcaacaacggcagcaacatggcgctggtaaatgccttcggctatgtgctgctggaggaggagctgtacaacaaaacctatgtcgaacgctataccgaagggctggatgcttaccgcgaggcggtgaaggattacgccccggaagcggtggaagggattgtcggggtcagcgcgcgggaaatccgggaggcgatgcgcatgttcgccgccgccccatccgccaccattatgtggggcatgggggtcacccagtttggccaggcggtggacgtggtgcgcggcctggcaagcctggcgctgctcaccggcaacctgggacgacccaacgtcggcgtggggccggtccgcgggcaaaacaacgtacagggcgcctgcgatatgggcgtgctgccgaacctgttccccggctatcaggaggtcaccgaccccgccgtgcgggcgaaattcgctgccgcctggggcatcgacccggcgctgatggacgaccaggtcggcacccgcatcaccgaggtgccgcataaagcgctgaccggcgagatcaaagcctattatatcatgggcgaagatccgctgcagaccgaagccgacctcggcctggtgcgcaaaggcatcgaggcgctggacttcgtggtcgtgcaggacatcttcatgaccaaaacagcggaaatggccgatgtcctgctgccggccacctcctggggcgagcacggcggcgtcttcacctgcgccgaccgcgggttccagcggtttgaacaggcgatccctccggcgggaaatgtgaagcgcgactgggagatcattagcctgctggccagcgaattgggctatccgatgcactatgagaacaaccagcaaatctgggacgagatgcgcgagctctgcccgctgttctacggcgtgacctgggagaaaatgggcgatatgggccatgtccagtggccgtgcccgaccctcgatcatcccggtacgccatggctgtataaagacaaccgcttcgacaccccctcgggtaaagggcagctgttcgccaccgcctggcgcgcgccggcggagcgcccggatgacgagtggccgctggtgctctgcaccgtgcgggaagtcgggcattattcctgccgctcgatgaccggcaactgcgccgcgctgcagtcgctggccgacgagccgggacgggtgcagatgaatcccgcggatgcgcaacgactggggatcgccgacaaacagctggtgtgggtcagctcccggcgcgggaaggtgatctcccgcgccgacctcagcgatcgcatcaatccgggggcggtctatatgacctatcagtggtgggtgggcgcctgcaatgagctgacccaggataacctcgatccgatctccaaaacgccggaaaccaaatactgtgcggtgaaagtggaagcgattgccgaccagcaatgggcggagcgctatgcctggacggcctacagcgacatgaaagcgcgactgaaagccgctgccgacgtctgacctcagggagcgcagcgcgctccctctgccgctgccggtgggttacgccgccggcagctgtttctccaccagccccacccacatggcgacgccggggccgatcagcgcatcgttaaagtcatagctggcgttatgcagcggcttcgacggggtttcgccgtcggtgcctaaccagaaataggcccccggacaggcctccagcatgcaggcaaaatcttcggaggccatcgacggcgcctgattccagcgcaccgcttgcgcgccgagagtggcgacggccacctcgcgcacctgctgcgcctgcagcgcatggtttttggtcaccggataacccgggaaccagctaatctcgccctgcacatcggacacctgcggctgggtcgccacatagctttcgataagctcccgcacgcgggcgcgaacgcgattgctcagacagcggaaggtaccgcgcagcaccacggtgtccggtaggacgttgatcgcctcgccgccgtttatctgggtgatgctgaccaccgcggaatcctgcggcgacaagcggcgggaaggaatggtctgcagcgccattatcagctgcgccgccgcgacgatcggatcggccccgctctccggcatcgccgcatgacagctctttccgcgcagggtgatctcgaaggcgtccagcgaggccatcatcgcgccatcgctgagcgccacttcgccaagagggatccccggccagttatgcagcgcgtagatggcgtccatcgggaagcgctcgaacaacccctcctccaccattttgcgcgcgccgccgaggttctcttccgccggctgaaagacaaagtggacggtgccgctgaaatggcgggtctgcgccagatgggcggcggccgccagcagcatcgcggtatggccatcgtggccgcaggcgtgcatcaccccgggacggcgtgaacggtagctgacgctccccagctcggtgatcggcagggcgtccatatcggcgcgcaggccgataaccggcccggggccgttctccagcgtcgccacgacgccggtgccggccagccctcggtgcacctgcagcccaaacgaggccagcagctccgcaacgcggcgcgaggtctcctgctcctgatatccgagctcaggcgcggcgtgaaattcacgtcgccagccaacggcttcggcgatcagtgacggcgatacggccatgtattactcctttcctgcatagcgtaatgctgaataatcggtcatgcgtcgcgtttttccccgtcgctcaccggcgtcggggcgctgccgctccctccgttatatcctgtcgttaccacgctgacaacgtcacgaaatgcggcggcggcgcggcgtacagcccacctgccgccctgcggcccttttttggtagtgatttcaacggtgacaacggccagtcgattaattattatgcaactcaggacggcaatttgccgaaggatccactactgacctctccgtcatcggaaataaaatgtttaacccagaccagaatcgtcttgcccccacgctggcgatgatcatggccgcgtcgcttgtgggatttatcaccggctatacggtgccgttaatcagtcttgagctggcgcagcagcagatcgcgccgctgtacgtcggcctgctggccgccctgccgcccgccggcatgatgatctcctctttcctctctcctgcgctgtgccggcgcgttgaaatgggcgtgctgctgagcggcagtcttatcctgctggcgctggcgaccatcgcctcatgcatgactaccgatatgacgctgcttttgctgccgcgcctgctgaccggcctggcctccggggtcattatcgtactcggcgaaagctggatcaccggcggcgcggcgggcagccagcgcgctaccctcaccggtctctacgcctcggcctttaccggctgccagctggccgggccgctgctgatctccgtcggccccgcctggcagacatcagcgctgatagcgattgtcgcggtcaccgccgtctgcctgctgatgctgcgccatctgcccaccggcactcgtgaaagcctcggggagcgcgccagctggcgcagcctcggcgcctttctgccggtactggcctccggggtcttctgcttcgccttctttgacgccagcatcctcgccctgctgccgctgtacggcatggacaaagggctgaatgaagggctggcggtgctgctggtcaccgtggtgctgaccggagatgcgatgttccagaccccgctcggctggctggccgaccgggtcgggattcgccgcgtgcatctgagctgcgcggtggttttcagcctgtcgctgctggccctgccgctgatgctcggttcgcgcattcagctgatggccatttgtctgctgctgggcgccgcggcgggcgcgctttataccctgtcgctggtgcgggcggggaaaaccttcaatgggcagaagctgattatgattaacgccctgttcggctttttctggtccgccggcagcgttgccgggccggtagtcagcggcatgctgatcggcatcactggttacgatggcctgatcgtcaccctggtggccagcggcgtgctgttcctgttgattcagtgtctgtgcaaaaacgagaaaaccctgcttgccagtgagcaggaagatgacatggacgaggcgacggagtccgcacggtagtccttacgggctggcctggcgccagcccttttttatggccctcaccggagggtatcctgttcttgctggctcactgctgttaaccattgccggcccccagccgagaggaaatcccatggaaagtaataccttacatcgtggcagattgatcgatcatattctgctggttgtcgaagactttgaggcaagcaaagacttctataccgccgtactgtcggcgctggagatcccggttatcaccaccgccaatgactacttgctggccgacgaactggtggtggcctcacgccacagcccggaggctgccgggaaactgactgggcgccaccacctggcattccaggccagagatcgtgacagggtggacgctttttatcatgcggcgctgacccatggcggacgtgataacggcgcgcctggcgaacgacactatcatcctggttactatgccgcttttgtgctggatccgcaggggaataatattgaggcggtgtaccatggcaaggctgagcgcagcgccgggtctgttgcgatcagcttcacgcagtaagcgggcgaaagtcacattttcttacctgcgcaattcccataataaatgtgggtgttatcatttccttgatgaataattcatacccatagctgaggcgtcgatgctggaaaacctaatcatctgataatcagacttccgaccatcactggccggactgattatcactgcgctgaaatcgaatgcggacactggcgagtgttcgcctattttgcccatgatgatgacaaaggtttcccggtatgaatgtttcccctcaggagcaagcgactttattcattctcgtcccctgcggacaaacgctccacatccacgcgatggcagcgagacccctccctcgcataagaaacgtcacccccagccagttaacccggtgcgttatccctctgccatgctcgatcactccctctgcatgccgttgcgttgccttacccaatgaccgtcgccgggcgaattttatctttcggtttgtcattccgcggccagcctgtgacgacagccgcaagggatccacatcaaccaggccccgataccagggaaaccgtcaccgaccagggagtcttcgcgtatgaaattagcgttgggaccgtacatccgttttagcagaatcttgttatttccgctggcgatggttatctatgatttttctgcttatctgactaccgatctcattcagccgggtattatccacatcatccgggaatttgaggctgatgttgcgttagccccggcctccgtcagcctctatttagccggggggctggcattacagtggctgctggggccgctctccgaccgcattggtcgccgccccgtactactgaccggagccatcatctttgctttggcctgcttcagcatgatctttgtcacgtcgattgatcaatatcttatcgcccgttttatccagggaaccagtatctgcttcatttcgacagtcggttatgtctccatccaggaggcttttgatgaaaaagagtctatccgcattatggcggcgctgacatccatcgttttgctggcgccggtaatcgggcccctggcgggcgctggcctgatgaatttcctgcactggaagttattgtttgcgatcatcggcgccatgagcttgctggcctgggcgttactgatttttaacatgccagaaacggtcacctctcagggccgggggtttcgtccgggagaggtattttccgagtttgtccgcgcctttaaacagccggtggtgctcacgggcgcgctggtgttgtcattcagtaacctgccgataatcacctgggtagcactctctccggtgatcctgatcgatgacggcgggatgtcgcgcggcgcctatgcctggacccaggtgcctgtctttggcggcgttattattgccagcatcatcgtggcccgttttatcaaggatccgacctctccccgctttatctggcgcactatcccgatacagctgaccgggttgttggtattactggcgggaaatattgcatggccccatacctggtggtggtccgtttcaggaacaagtctctatgccctcggaacaggcctgttgttccccgtattattccgttttgcgcttttttcccactccctgccgaaagggacggtttcagccaccatcaacattgtggcgctcagttttatggcggcctcggtggaagtagcgcgctgggtttacttccaggctggcggcagaattgcttttcactgcctggcgctgatagcgggaatcgtcgtcatcatgctggtctcgcgcttgttaaaactccgtcaacaacatctccttcagccagcctgaaggtttatgcctttttgcccgcaacaggagaacactatgttttcatacattatgctgggaacgaacgatctgccacgcgccatcaagttctatgacccgttaatggcgctgctggggcacgtcaaagccggccgtaacgaacagggggcgtcctggggcaccttcaacggcaatcacacctgcgggctgtgcgtgggcgttccttttgaccagcagcctgccggggtgggtaatggaacgatggtggcgcttaacgcccgctccgtcgcacatattgcggaactgcatgccctcgccctgcaactcggcggacgtgacgaaggcgctcccggtcaccggccgcagtatggcgacggttttcacagcgcctacgtccgcgatcccgacggcaataagctggcgtttgtttactatgcgtctgcagattgaatggctgcagcggaggtggcttttgcaggcggagaaaagggtgtcaggacggccaacttcgccgtccttattcaccgaggaataaaaaagccagcagctcaagcgctgcggcttatcttcccggcaagttatctaccgcaaagtgataacgtaatccggcgtcgcgcatacagcgtttccgccgccagctgaaaatcatattccatcgccttcagctttttcgtcttgagctgttttagtggaaaaccctcgatatgccctgtcgcgaccaaccaccggatttcagccgtactcagcttgagctgttttttcagtattgatagcaggctgatgcgaaatggctgactgactctgacgcgcaccgttatccgctgacatgccatcaacgtaaccgaccattgctcgtgaatacgaaaatcaggttgccccgacggctcggcgcggttgcgcttcagcgtcgcgaggtcagcggcataatagtgaaccatggctgcatcgttcttcagcaggcgctgaagcagttcgcggtttatcttgctgacgtgcagcctggaaaacagggcgatattccaggtgtaatcgcagtgcgtgcatttatagatgctccagatatccagcagcttcttttgcgaattcacccggatggcgccggaaggcgcaaagtcgcgttttacattgcaggcggggcagcgtttggcaatgtgctgataccccacgggcgtgaccgtccatgtaactgtcataacgtaccttttttaacccatacgaaaccgagtccgtcattaacggaccatgatttttggcgtatgaaaaatagttaatcgctatttttcagtgggttaaaaaaagatttccaacgttattttcctggagaagtcctaatcgacaccctgagattaacaaaggggttatcgcgggatatatgagccctgtcaatgtttgcgcggatgattaaaagcttcgtcaatacacccggaatgctcagcgggctggcatcgcgccagcccgcccggtttacagcaccttgctgaggaacgcggcggtgcgtgggttggtcggcgcgctaaagatctgccccggcttgccctcttcctgaatcacgccctggtcgatgaagatcacccggtcggccacttcgcgggcaaagcccatttcgtgggtcacgatcaccatggtcatcccctcgctggcgaggtttttcatcacctccagcacgtcgcccaccagctccgggtccagcgccgaagtgggctcatcgaacagcattatcgacggcttcatcgccagtgcgcgggcgatggctacccgctgctgctggccgccggacaggctcgagggccaggcgtcgcgcttatcgcttaagcccaccttcgccagcaaggcttccgccaggtcgaccgcctgctggcgcggcatattgcgcagattcatcggcgccatgatcaggttttccagcaccgtcatgtgcgggaacaggttaaagcgctggaacaccatgccgacgctttcgcgcatcttgttgaggtcggtggtccggtcgtgggcggcaaagccgttaaccaccacctcgccttcgctgaccgtctccagggcgttcatgcagcgcaggaaggtgcttttccccgagccggatgggccgatgatgcacaccacttcctgcggtttaatatcgcagctgatgccgcgcagcacgtggctgtcgccgaagcgcttatgtaagttattaatgtgaatcacttttgccaaacctcttttccagacggttaaccagctgcgccagcaggaaggtgatcacccagtagaccagagagatggtcaggtagggttcccagtaggtggcgtaggcgccggagacggtgcgcgcggcataggccagatcggccaggccgatcgccgaggccagcgacgagtctttgacaatggcgatggcgttattgcccagcggcggcagaatacggcgaaacgcctgcggcaggatcaccttgcgcatggttttccaccacggcatgcccagcgcgcgggaggcctccatctgccctttgtcgatcgactggatgccggcgcggaaaatctccgacacataggccccggcgttaagggtgatcgccacgatgcaggagaggaacgccccgtagctggcgcgcagctcgcgggcaaagtcggcgctcatcaggccgctggtcaccagcaggccgtcgcgcgggttgataaacagcggcaccagcgcaaagtgcaccaccataatctgcacgaacagcggcgtgccgcggaaggcgctgacgtaaaagcgcaccggaaactgcaccaggtagcggagaatatatttccacggcccgtgctcggccttcgccatccgcccgagaccgagagttaacccccacagcgtcccgaggatcacgcagataatggtacatttaatcgtcatcagggcgccgtccacaaacagcgggccgtactcctcgatgatctcccaacggaatcccgtcatagtccttccctaaaaaatacggctatcgcctgggcgatagccgtggtcactgaaaaaggtggattattgcgctggcagcgtcggcacgttgtcgtcgaaccaggttttatagattttggcgtaagtcccgtcagcaacgatcttttgcagcccggcgttgattttgcccagcagttcgctgttgcctttcgccaccgcaataccgaaatactgacgctcaaatttggcatccggcaccagcttgaactgcttctccgggtgctgtttgatgtagtacttcaccaccccgacgtcgccaaccgcggcgctgacgccgtcctcaaacagctcctggagcatcagcggggtattgtcgaaacgcttgatcgcggtgctgtttttacccagcacctcagaaaccacgatatcgccggtgctggagttcaccaccccgaccttctcgtttttcagggccgccagtgaatccacctgcgagtcctgagcgacgacgatagactgttcggccgggaagtacggcgcggagaaatcgaccatctgtttgcgtttatcggtgatggtgatcccggagatgatgatgtcgcggtcgccggtgttcagcgtggcgaagatgccttcccatggggtattgaccagcttaacgtcaaagccttcggctttggcgatggctttgatgatgtcgatgtcgaaaccttccagctgtttctggctgttttcaaattcaaacggccggtaggtgccgccggagccgacggtataggtttccgcagccgcctgtccggcagccgtcagcgcggctatcatgcaacacgctttgagcaaattcttgaccatgagatttcctttttatgcatttattttgcataaaaatacacacactcacttttatatgcaaccggaaaccttcccgctggtgaattatcttctcaatggccccgtttaccgccggatttaccgatagcccgatgcagatcgttgattcgtttcagggatttcaccgttttttgtggcgtggtagaggccaccgacaggacaatcatctcgagacagaccagcaccgtaccgtgcagcggcatccggctactgtccccaccgcgcgggacgtcgatcaccacctgcgcctcctggctgaagcgcgagtccaccgcctgggtcagcaggatggtcggaatacccagccgcttcgcctcgcgcagggtggtcaacccttcgcgatggggggatttttgccccatcatgatcagcacatcgccgcgctgcaggtcgataagctgttcggcaaggctaaagcccgtgcggttcatcacgtacgccggcaggccaatacggctgaacaaccgggcggtgtattcggcgaggatccccgaggcgccgataccgaagatccccacctggcgcgcgtcgctgagcaatgccaccgcctgagccaccgccgcgcggttgtcggcccgcgacaggacctcgcacacccgctgatggccttcaagcacaaaatcaatactggagttgacgtcgctggagagcgcggtaaccgtcgagcgcatcttttccgccgaggtgaccgaggtgccgaaccagcgctccatggtctgcttaagctcgcgcagcccggcgaagcccagcgcctggatggcaagcaccaccgtggcgtcggaggtctgggtcgcggtggcgatctccatcgccgtatgctccagcaccacctcgcggttgtcgttgatatagctgaccaccgcccgcagccggggggagagctggtgcgcccgggcgcgatagcgttcgccgaacagatcgactttacccttctctttttttaccgcgcttttcatttggcctccgccgggatcggcctgccggcaatatgcgactgcacctgggccaccatcagggacagcgcggcgtaggagttggagatcacctcttcccgcggcagtaaaatatagtgcccggtgcggcaggcgcgcataaagtcgcaccagccgggcatcacgccttccatcgcctgcagctcatcctgcggcttaccgccggtatccgaccgccaggtggcgaagacaaaatcagcgtccagctccggcagctgttccgcgctgacgtcaatgcgctgaccatcggggatccgctcaatcagcggcggaaagcggaacccggcgtcgcgcagcacccggcccagcgcatgatacgaatgatgcaccgtgaccttgccgttgttcgcctggatcactgagacgctgtactgcggtgggttgaccatcgctttcagctgcttgatttgctcctgatagcggcgctcgaggatcgccagccgcggctgggtgccggtcagctgcgccagcttgcggtaaatctccggggcgctgccctgcagatggtcgatgctcaccgtcggggcaatcttctccagttgctccactgacacgtggcggctgggctcagtgatgatcagatccggcctggctgcggctaccgcttccagatcgatatcggcggtgccaataaagcggatatcgctgttgtcgaaatcgacaccggtgagctgggcgctggcgcgcagatagtggctaccatccgggcgcgtccggccgtggctggcgatcggcggcgccccgagctcaatcagcggaatggtaatgtcgagatcgtgcatcgaaacgatacgctgcggatgcagcgggacggtgaccgtgcggcctaaatcatcggtgaaagtttgagtttgtggggcggcggcgctgacggcccccgtcagcaacagcagcaatgagacgaaccaacgcatactaccttcctggttaaagggcatcacggcgacgccagagcaagacaacgaagaacgggcagcccaccagggcaatgacaatccccgccgggatctgcagcggggcaaacgccagccggccaagggtatcggtcgccagcaccagcaaggcgccaatcagcgcgctgccgcacagcagcgatacctggccgccgcgcagcacgaaacgcgccatatgcggcgccatcaggcccacaaatccaaggctgccgacgcaggagacgctggccgaggtcagcagcaccggcgcaaaaaagcgcagcaccgtcagctgctgcagacgtacgccgaggccgacagcggtccggtcgcccagcagcgcaacgtccgccgcccgggcggtacagaacaggatgatggccccgggcagcgcccagcaaaaagccaccgccagcagcggccaggtggcggcctgcaggctgcccgccagccagatcatcgccgtctgcacgtcgcgtacgtcggcggtggtcataaagatgccgaccgcggccgccaggctccaggagacgccgatgccaattaaaataaagcgcggccgcgaacagtcgcgggccagcgtcaggaccagcagggccaccgctatgccgccgaccatccccgccagcggccgccagaccaggcctaccgccgggaaaaacagcaccagcgccaggaccacgatgctggccccctctttgacgccgatcagccccgggtcggccagcccgttacgggtgatgctctgcatcgccgcgccggccagccccagcatggccccgcacagcagcgccatcaggatccgcggcaggcggatatcaaacagaataaagcgcggctgctcgcccatctcctgcggcgccagcagggcccgcgccagcgtcgacgcgggcagcggatagctgccgcggctaaggctgtacagccccagcgccagcagcgtcagcactatgctggcggcaatttttaacgccgcaggacgcagcagcagatgacgggaggcgaaagccagcggccgaaaaccggcccggtgaacggcgcgcgtcatttaaaaaacctcgcggcgataaagataaacaacggcgcacccaccagggcggtcatcgccccggtcgccagctcctgcggcgcgaccagcgtccgggcggcgatatccgccagcaccagcgccagcgctcccaccggcgcagccaggggcagcgccaggcggatgtcttccgtcaccagacggcgcaccacgtgcggcaccaccagcccgacgaagccgatcggcccggccaccgccaccgccgcgccgcacagcagcgcaatcgccagcaggcccagcagcctcgtctggacgagattaacgccaaggcccagcgccaccttatcccccagcgccagcacattaagccgtggggcaatgagcagcgcgacgccaaggccgatcagcgccgggaccagcgccgtctgcagcgtgctccagttcagtccggccaggtcgccggccagccaggtgcgcatcgccagcagcgtctgttcatcgagaattaatatcgccgccgtcaccgccgacgcaaaccctgacagcgccactccgcacaacgtgatgcgcagcggcgtcgccccgccgcgcccggcagaggccagcgccatcacgccaccgaacagcagccccgcgccgcaggcggcggtcagcgggcgcccggcggggaaagcgccgaaggacaggcccagcgccgaggtcgccaccaccgccagcgaggcgccggcattaagcccgagaatatgcggctcgccaagcgggttacggatcaccgtctgcagcagcagcccggcgacgccgagcgccgcgccggtcagcagcgccgccgccagccgcaccagacgcagatcgatgataatccgctgctcaaagttgcgcggatcgtactccagcagcgcctgcagcaccgtctgcggggcgatccagcgggcgcctaagccaagatgcaccagcgaggcggcgataagcagcagcgttagcagaagcagcgccagccgggggcgggggcgacgccgcgcggaaagcaggatggccacgctcattgtgccgctgcctggcgggcgcgaaacggcataaagaacggtttgccggtttgcgggttaatcgacatctgcacgtcaacgtcaaacacgcgtttaatcagctcagggctacagacgtcgttgtcgctaatcgtgccggcgatgcgcccctgtttaaggaataccagcagatcggcgtagttcaccgcaaagttaaggtcatggagcactgtcaccaccgtgcggccatgttcgcgggtgagggtctggagcagctcaaggatatcgacctgatagcgcagatcgagccaggtggtcggctcatcgagcagaatggtggccgtttgctgggccagcgccatggcgatccagcagcgctgacgctggccgccggagaggctgtccaccggcagatgggcgaattcggcggtaccggttaagcgcagcgcctcctctaccgccagctcatcggcctcggaccactggcgcatcagcccctgccacgggtagcgcccgcgcgagaccagctcgaaaacggtcaatccttccggggtcaacggcgattgcgggaggatgcccagctgccgcgagacggtcttcgtcggcatctggtgaatggctttcccgtccagacgcacgcagccgccgagcggtttcagcattctggcgatggtcgagagcagcgtggatttgccggatccgttcgccccggccagcaccgtcattttgccggtgggaatggtcaggttgatatcgtcaacgatcagggtctggccgtagccggccgacagggcatccagtacgatcccctgctctgcaggtttcacccgctgtggcataactcgctcctgcgccgcagcgttccaggcgatagctggacattctgcagtcaaatcaaaataaatctcattctcttttgatcatgacggggatgaatgtagtagtcaatactcgccatcgtcttcagacggggacgctgactacagcgaggctgtgccaacgcaatataattaaaataaaataatatcagatagataactacagaacattccctactggaggtgtttaaaacgtcctgttcctcgccgctgaatttttatcttgcataacgtttactactacatcccttcatgattgaatgattctcaattacacatctgaaggcgcattcagacgctaaacagagtgctattattattcagggcaatgattttattggcttaatctgaccgcaaaggcagattcgttcacgagaaacagataatgactcaaccccatgtcgcctgcaggacgttgccagggcgcgcgcttttttcgcttctttttttagcctcaccgggattaatggccgccgacaatcgcgcggcgaaaagtactaacgacgcggaagagactatcaccgtagtggccgacggcgcgcagcaaagcgccaccagcggctatcagccgctcagctccgccaccgcgacgctaacctcgatgccgctgctggatattccccaggtggtcaataccgtgagcgatcgggttctcgaagatcagcacgccacctcactcgatgaggcgctgtataacgtcgctaacgtggtgcagaccaacaccctcggcggtacccaggacgcctttacccgccgcggcttcggcgccaaccgcgacggctcgatcatgaccaacggcctgcgcaccgtgctgccgcgcagctttaacgccgccaccgaacgggtggaagtcctgaaggggcccgcctcgacgctgtacggtatcctcgaccccggcgggctgatcaacgtcatcactaaacggccggagcggcagttctccggttcggtttccgggacctccaccagctttggcggcggcaccggcagcgtcgacatcaccggccccatcgaaggcacaaatctggcgtaccgactgatcggcgaatatcagaatgaggattactggcgcaatttcggtaaaaacaaaagcagctttatcgccccttccctgacctggtttggcgagcgggcaacggtgaccgcgtcctattcgcaccgcgactacagcgccccctttgatcgcggaactatcttcgatctgaataccggccatgcggttaacgtcgatcgcaaaacccgcttcgatgaagcgtttaatattaccgatggctattccgatctcgctcagctcaacgccgagtatcgccttaacgacgcctggaccgcgcgcttcgactacagctacagccaggatcattacaacgataaccaggcgcgggtgatggcctatgattcggcgaccggcaacctcacccgccgggtcgatggtacccacggttcaacgcagaagatgcactccacccgcgccgacctgcagggcaacgtggtagtgggcggcttttataacgagctgctgaccggcgtcgcctatgagaattacgatctgctgcgcaccgatatgctgcgctgtaagaacgttaaaggctttaacatctatcatccggtctacggcactctcgacacctgtaataccgtctccgcctccgacagcgaccagcggatccagcaggagagctatgccgcatacgtgcaggacgcgctgtacctgaccgacaactggatcgccgtcgccggcgtgcgctaccagtactacacccagtacgccggtaaaggccgaccgtttaatgtcaataccgacagccgcgatgagaaatggacgccgaaagccggcctggtctacaagatcacgccgaacgtctccctgttcgccaacgtcgcccagtcgtttatgccgcagtcgtcgatcgccagctatatcggcgagctgccgccggaagagtccacctcttacgaagtgggcgccaaattcgacctgttaaacggcattaccgccaatatcgcgctgtttgatattcacaagcgtaacgtgctgtacaccgagagcattggcgatgagacggtggccaaaacggcgggcaaagtgcgttcccagggcgtggaagtggatctggccgggtccatcaccgataacctcagcgtgatcgccagctacggctacaccgacgccaaagtgctggaagatccggattacgccgggaaaccgctgccaaacgtaccgaaacataccggttcgctgttcctgacctatgacattcataacgtctataacagcaataccctgaccgtcggcggcggcggccatgcggtcagcaagcgttccggcaccaacggcgcggattattatctgcagggctatgcggtggcggatgtgtttgccgcctataagatgaagctgcagtatccggtgacgctgcaggtgaatgtgaagaacctgtttgataagacctattacacttcctcgatcggcaccaataacctcggcaaccagattggcgacccgcgcgaagtgcagttcacggtgaagatggatttttaagccggaccatggcgtcgcgccggatattcattgccgggcggcgctgcgcttgcgccggcctacgtttccgtgacatttgtcgcagttcgtaggcccggtaaggcgcagccgccaccgggcaaaaacaggcgcctggcgccggatgcccattgccgggcggcgctgcgcttgcgccggcctacgtttccgtgacatttgtcgcagcgccaccggggaatgcgttcagcttaccaatccgcctcctggccgaggatgcgcaatatatcctgacgatgctgcagcagctgcgggttatcgcgatgacggggaaaagccagcggcagcgcaaactcggcgataatccgccctggacgcggcgacatcaccagcacccgctcgcacagcagcagcgcctcttcgatatcgtgggtcaccagcaggctggtatacccctgctgctgccagagggcgatcagctcccgctgcatactgatgcgggtcagcgaatcgagtttgcccaacggctcgtcgagcagcagcagacgcggttcgttcaacaaggcgcgcgccagcgccgcacgctgtgccatccctccggacagctgccgcggccacgcctcgctgaaggcctgcagcccgatgcggtcaatcaacgcgtctgccttcgcctccagcccctttttcccctgcgcctgcgggcccagcagcacgttctgccgcaccgtcagccacggatagagcgtcggatcctgaaacaccagaattcgctccggccccggggcgccgagcgccgcgccgtcgatctgcatctgtccgctctgcggcgcttccagccccgccagcagccgcagcagggttgatttaccgcagccggaagggcccagcagcgccacgctttcccccgggcgcagctgcaggctaatattctccagcaccggtaccgtctgtttgccaagcgtaaacgcatgatgaagatggctgatggataccgccgcgccgcgcgctatcgtctcggttaccattgcatccctcctcgctgccagctcagcagccggtcacgcagcataaataatccgcttatcaggccggagcataacaaggccatcaccagcagcgcggcatacatattcggataggccgcccagccctgggcccactggaggtaaaagccgatccccgacttcaccccgaccatttcggcgacaatcagcaccgaaaacgacgcgccgagccccataaacaggccgacaaagacgttcggcaacgcggcggggatcgccacccgcaggatcaggaaacgctggctggcgccgagggtccgcgccacgtcgtaccacgccttatcaatgcccatcactccggaccaggtcagcaccgtgaccgggaaccaggtgctcagcgcgatcaaaaacacgctggcgccgaagctcgagggaaaaataaacaggcacagcggcagcagcgcggtggacggcaccggccccagcagacgtaacaccggatgcacccagtagccaatccgttgcgaccagccgatggccagaccggtgatgaacccgctgctggtacccagcagcacaccgagccccagcagccccagggagtgcagcaggctgtcgagcaggcgcggccagtcgtcgtgcagcacctcgatcagcgcctgcggcggcgcgaagaatggtaccggcaacacggcagttttggcggtcagcccttcccagacagcaaacagcaccggcagcagcgccagccacttgccggcatgcagcacacgcgcgccgcgcgcccgccagtagcgatagctcagcgccagcagcagcaagccgccgccgagggtgaattgcgccagcgcccagccttcgctaaacggccagcgccgcccggcgtcgggccaggtaagagtaaacagaccgcccagcagccacagcgcggcggccagcagcccttctccccacagcggcgcgcggccggtggggcgcgccagagcctgctcaggcgaatacgttggcatagatactctccgcgaactgatggggatcggtacccggcttgatcacctgcacccgctgcaggtcgaccgcatactgcgtcagctctttcacgaacgcttcgcccaccgcgtgatggccgtggccctgcccgtggaggatgccgctcacctccgcttcactggtattcagggcatgggcgaggaaggattgcgccacgctttccggatgcgcagcggcatagctgtgcgcctcaaggatcgcctgggtgagcgccgcggcggccggtttatggtcccgcgccaggctcccgctcacccccagcacgcagcagctgaggttggcataatccccggtcatattgctggcgatcagctgatacttaccggtctccagcagacgatagctgaacggctcgctgccgctgatggcggcgatttcgcgcttgtccagcgccacgctgagcagatccgccgggtagactttccactgcacgtcgctgatcgggtcgataccgtggcgcttaagcagaatggcgaagaagtttttatccggtccggccatgtcggtgacgccgatggtttgccccttcaggctctcgaggccgccgaacggcgagtctttagccgtcagcaggttcagacagccgccgtgggtcccggcggtgagcttgacgtcaaagccctgctccagcgccttcagccagcgcagcgccatccccaccccggcgtcggccttaccggtggcgatcgcctccagcagcacatcggtggagctgccgaagttaacaaactcaacgtcgaggttgtatttactgaatatcttctgctgctcggcgacggcgaccggcgcgaggcataccgcgcttttgttgatcgccagcttgatcttgtagggctctggcaggcgcagcgccggatgggcatcgccgccggccatgtccgccatatcatgagcccacagcggcagagagaccccggccagcgccaggccgccgctgagctgtaaaaaacggcggcgggaaaaaggggttctggtcatggcgtcacctcggcggcgggcacgctaaaacggcggtcaaaggtcggcttcacgtccagccgggtgcggatcaggccgttggcgagataaaagtccgccgttgcctgctgctgggccaccgtttcctcggccagcggctgccactgcgactggcggttggcaaactgcgcacgggcgatctccgccgggaagcggatgatctcccccaacgttttgccgtagctgtcgagattggcgtaggcccagcgctcggcgccggccaggcgctggagataatcctgcagcgcggcgcgtttatgcggatcgttaagcgcggaatccgttgccgcgaggaaggtattccccggcagcagccctttgccgctcaccaggatctgcccctcgttggtcttcaccatttgggtggtgtagggctcccaggtcgcccaggcgtccaccgaaccgtttagcaacgccactttggcgtccaccgggccgaggaacacccactgcacctccttcggtgaaatccccgcctgctccagcgctttcagcgccacgaaatgaccaatcgaccctttaccggtggcgatgcgtttgccttttaaatcagcgccgctttttaacgtgctgccgggggataccagcaccgcggtccccgccgggttgcttttatccacggcaatagctttgaccggcgcaccgttggccagggcgaagagcaacggcgcatcgccgatgatccccgcgtccacggcgcccgcgttgagggcttccgccagcggcgcggcggccgggaactcggcccacttaatgtcgtaagggagattttgcagggcgttggccgcctccagctgcgaacgcatgccgcctttttgatcggcgatacgcagggtaagccgctcctgcgctgtcgcgtagccgcccagcgccagcagcatcagcgcggccgccaaccggcctgaaaatgatagacgcatcgtgattatccttgtgattgaaagacgaagttgccagctgccagccaggcgctgtcgctctgtggggtatgtacccgtccgcagagcacattgcggtagtggcgttccagcgggttttgtcggctgagaccatgattgccggtcagctcgagcgcgatattcaccgcctgaatggcgttgtcggtgatggtgactttcgccagattggcctcgatggcggaaaagcgcagcgcggcggcctgctccagcaggctgcggctgaccagcagcagcccggcgatctgcccgactttctcctgcacccgtggcagacgagagagcggatggccgagaccggcgggcacccgccccgccagccacttcaccagccagtcgtgagcggcgtgggcaatgctgtcatagatcgccgccagcagcgccgtctgccggttggcgaacaggcgaaacggttcggcctgggcggcggatggcgtatcggtcggccagacatccaccgcgtgctctgccgccacccgcacgtggttaaaaataacttcatggctgccggtggcccgcatcccggcgtgatcccagctcttcaccaccgtgatacccgggctgtcgccaggcaccagccaggtacccaccagcggcgggttatcatcgcttctggcccacactgccagccagcgcagtccttcaatgccggtggtataaattttatggccgctgatgtcccagccctccgcgcgacgggtcgccacggtgtccggcaggccgccccgcgccggggagcccagctccggctcgacgcgcaggctgttgatgaggccaccgtgttcgacagcatcgtgaaaaacctgctggcgcagcggcgcgtgccaggcgtcgttttccgccagccgcaaatggtggagatactgcatgcagacaatcagcgctgtcgccggctctccccaggcgatggcggcgatgacctgctgcagctgggccagactggcgcccgcgccgccgcaggatggcggcacggcgagacttaaccagccccccgcacgcagatggtcgatattacgccagggaaactcgccgctggcgtcaaggctggctgcctgctccgccatctgctggcgaagcgccgtcagctgccgggcccagtcgtcgcgctcaggatggatcacgatgcgcgctccgccactgcacgccgggcggctttttcccgggcgatcggcaacagcgcccggccatagtcggccgcgtcgttcagcggatcgaagccgcggatcaggaagttacgcaccccgaggtcgtagtaatcgagcagcgcatccgccacctgctccggggtgcccaccagcgcggtggagttatgtccgccgcccaccagctgggcgatgccggtccacaggcgtttgtccaccactctgccctgcgccgcagtagcccgcagccgctgggcgccgatgctctccggtttggctttgaaaccgcccccgcgctgcgccgcctgctcggtggcgacgtgcaggatatgctcggctttctcccaggcttcggcttcgctgtcggcgataatcggccggaacgagacgctgaagccgatatcacgctggtgtttcgccgcttcggcgcgcacccgctggatggtctcgccggtttgcgccagcgactcgccccacagggcgaagacgtcggcatgtttgccggcgacggcgatggccgcttccgacgagccgccaaaatagatcggaagatgcggtttttgcagcgggcgaatggcggaccaggcctgctcggcctgatagaaatcgttgtgaatatccaccggctgctcgctggtccacacctggcgcacgatgtcgaggaaggcgtcggtgcgggcgtagcgctggtcgtggtcgagataatcgccatcccggcgctgctcggcatcgttgccgccgctgatgatatgcaccgccaagcggccctccagcaggtgctcaagggtagcgaatttgcgcgcggcaagggttggggaaacaaaaccgggacgatgggccagcaggtactgaattttctgcgtcgacagtccggccagggccgtcaccagaaagccgtcgggttgatcggaccagtggccgaccagcagacgatcaaacccggcggcttcatgggtttgcgcaaagcgaacgatatagtcgcggtcaaagatcggccccaccggggcaatcgtttcggaagagaggcggtggccaatcatgccgagaaactgaatgctcatgaacaactccttgcgtcagggtaatggagtggccgcgacagcggcgctggtcataaccctatacagagcgtgttaatgagcaaaatgcatttttatcatatcttaatatgcttaattagcattaaacaaaaatacatagtgctttcagtcggatacggtcagctgctgcatcactttgctggcaaaaaaggtcagcggcggctgcaggttcgccagatactgggcgtggatcagccacagtgagaccgcaggctgaaaatcgctgaggctgaggaccgcgacctcgtcccgccacgggctgctggccagcgccgccctcggcaccagacccagccccagcccctgcgccaccagcgctatctgcagctgcgcgcccgcgctctcgacgttgagcgtcaaccgcaatccctggctctgcagctcgcgaatgagcccggcgcgcaggccacagccgtcggggttaaggatccagccccgttcggcgcactcccgcagggatgacgcgcgcaaattcaaacgccggccgacgatcggcaccacctccaggggacacagcaggcgcccgctgtagccctcggcgaagctttgctgggcgggccccatcgccagcatgccgtccagctcgccgttttccagccagcgctgcagctgtccgctccagccgcaggtgatctgcggcgacagtccgggaaactgctggctcagcgccgacagcgccgccggcagggcaatctcgctgagactctgcggcacgccgagacgcagcgcgccgcgcggctcgccttccggatccaacaggctgtagagttttttcgtctcacgcttaatgctcagacactgctcgtacacccggtgtccggcggcggtcagagtcagcgggcgggtctggcgctctaacagcgtgacgttcagctcctgttccagacgctgcaggcgccgggtgatggccgactgggtgatccccagatattccgcggcctgattgagggaggaaaactgcaccgtggccagcaaagcgtcgatatcgtcaatgcgcataggatccttatgtgaaatttgcatattaatatatgcgtaaattgcatttaaataatattaacgcctctgttagcgttttgaccagtccctctgacaggaaccgcacatgactgcaccacgactggaaaaattacgccatttcattcatgaggtagaccgcctgcaccgcgaacaccaccagaccgccccgctgcttgacgccgtggcgcagcggctggcggcgctggtgcgttacgacgactggctgccggaagagtacaccctgccgcatccgcaccattaccagcagtatctgctgcatgccgactccggggagcgcttctcgattgtcagcttcgtctggggaccggggcaagcgacgccgatccatgaccaccgggtgtggggggccattgggatgctgcgcggcgcggaggaaaaccagcgctaccagctggatgccgatggcataccgcgcgcgcgcggcgccgccacgcttctggaagcaggccaggtggagaaagtatccgctgacgatggcgatattcatcgcgtcagcaatgcgctggcggatcgcgtctctatcagcattcatgtctacggcggcaatatcggcgcggtgaagcgcgccgtgtataccccggaagggcagcagaaaccgtttatctccggctactctaaccgccatttacccaatatctgggattcctcccgcgaacatcaaggataaccactatgtccacctacgcttatcgccaggccgccgggatccgccaggcgctgctcgaccgtcgtgaactggcgctgatcgacgtccgtgaagaggccgatttcgccaccgctcatccgctgtttgccgtcaatctgccgctcagcaaactggagctcgaggtccgccggcggataccgcgcttcaccaccccgctcaccgtctacgacaacggcgagggtctggcggagatcgccgtcgaacggctgcggtcctggggctatcaggatgtggccctgctggccgagggtctcgccggctggcgccgcagcggcggcgagctgtttcaggacgtcaactccgccagtaaagcctttggcgagctggtggaaagcgtgcgtcacacaccgtcgctcagcgcccaggaggttcaggcgctcatcgacagccggcaggaggtggtgatcgtcgacgcccggcgcttcgatgagtaccagaccatgagcatccccggcagcatcagcgtgcccggcggcgagctggccctgcgggtagagagcctgacgccctccccgcagacgccggttatcgtcaactgcgccggacgcacccgcagcatcattggcacccagtcgctgatcaacgccggcgtgccaaacccggtccatgccctgcgcaatggcactatcggctggacgctggccggccagacgctggcgcaccagcaacagcggcaatacgatccctccgcccgcgcctccggcgcccgggccgctgaggtggcgcattttgccgaacgggccggggtggcggtcatcgatgaggccacgctgcaacgctggcagcagcagagcgaccgcaccaccttcctgtttgatgtccgcagccccgaagagtacgcggcgggtcactatcccggcagcctgagcgcgccaggcggccagctggtgcaggagaccgaccacttcgccagcgtacgaggggcgcgcattgtgctgctggatgacgatggcatccgggcggcgataaccggctcgtggctggcgcagatgggctgggagacggcgcggctgagcgcgctgtcgaccagccagttgagcgaacgcggggtgcctgccgccgaggtgccgcccggcccgcaggcggaggagataagcccgacgcagctggcgcaacagctggaagaacccggtacggtggtgctcgattttaccaccagcgccaactttgtcgctcgccatatccccggcgcgtggtggctaacgcgctcgcagctgcgccaggccctggaagcaatccctcccgcccaacgttacgtggtgacctgcggcagcagtctgctggcccgctacgcggtgccggaggtggcggccttgaccggtaaaccggtgcagttgcttaccggcgggacgctggcgtggatcgccgccggtctgccgctggcgcatggcgacagcggcctcgccgtcgagcgccgtgaccgctatcgtcgtccgtacgaaggaaccgataattccgccgaggccatgcaggcctatctggagtgggagtatggcctcgtggatcagctggcccgcgacggcacccacggttttcgggtgctctagcgcgagcccgcctcaggcttcgcgcatgatccacgaatactgaaagctcttcggcgccggaaaatgggtccggcgccggtaggagcccagcgactgcggggtgcagtaggtacaactccccagccattcaacgctcgccggcgccacccccgcctctgcgaagatcgcttcggcaaaggcgcgcagatcaaaccacagattatcgctgccacgcgcggcggctttgagcggatcgctgaccgggcccgaacgggagtggaacagccgctgtcgatggcgggccacccggtcaccgccgggctgatccagcagttgctgatagaatccggcggagacttcgtaacagcaggggtgaatatacggccccacggcgatgaccagatcggccaatgccaccccctgctggcgaaaacaggccagactgttgtcgacaataccgctgaccagcccctgccagccggcatgcacgctgcagacgtagcgaccgtcgcgcgaggcgatcagcagcggcagacagtcggcggtcaccacccccaccttttgcccggctaccgcggtaaacaccgcatcggcgtgcgggcgcgtcggcagcggctgctgataatgatgaacctcattaccatgcaccagcttcaccggagccagctcggcatagggaaaggcggcggtttcatggacatcgagaaaagcgtgggggatgccagggatcgcatttagcaaacgggaggtgtaagccatagggacgataagcgtcagggaatgatgtcttaccttaggccaggggacgcggacaggcaaggcggcggcccggcatttttttaccagaccgccggatgcatatcagaccatggccgcgcgctgctggcgatgcatcagccagaacaccgccacgccggccaacacaatgcccggcgccgaggccgccatcaccccgacggtgccggcgccgagggccagcatcttgccggccagcagcgggccgctcatcgccccaagacgccccaccgccacggcggtgcccaccccggtggcgcggatggccgcgggataaaaaagcggcgccagagcgtaaagcacactttgtccgccggtggcgaacagcccggcgacaaaccccgccagcagcatgccagtcagcgacgacgcgctgcccagcgccagcagcgacgccagaatgccgctgtagatcaggagcgacatccgcagcggggtgagcttatccattagcgcccccagcagcagcgtgccgcaggcggcgccggtctgcagagagaacatcacccccgccgcctggctggcgcggaatccctggcccaccagcagcatcggcagccagttgatcagcatatagaccaccagcagggtgaaaaaataacccagccacagcagcagcgtagcggcggcctggcccggggcaaacagggtgcgcagcggcacgctggcctccgcgcgctgaaacgcctgcgactccggcagccagcgcatcagcaacgggatcagcagcagcgggaccacgccgccaatccagaaaatagtctgccaggccgcggcgagaccggaaaagcccagcgctgccgccagcgcggcgccaatgggtacgccgcagtacatcaggcttaccgcccggccgcggaagcgtgaaccagcggcttccgaggttaaggcaatcaggttcggcaatgccgccccgagcccgacgccggtgagcaggcgcgccagcagcagcgtcgggaagctccatgccagcgcggtgaccagcgagaacaggccaaacagcagcaccgaccccaacagaatgcgcttacgcccgtggcggtccgccagcatgctgcccaccagcgcgccgggcagcaggccgaggatcccggcgctgaagatccagcccatctgcattttatccagcgcaaaggcctgcgccatgccgacggcggcgatccccgccgcctgcagatccagcccttccatcagggccaccataaaacagagcccgatggtgaccaccaggcgcgaggggtttgcagtcgttatcttggtcatagggtaccttggcgatagccgaacaaacggagcaggtgactggcggctgatgctttgtcagccgcacgttcttagttatttattgcggttaagcagatccagcgcgacgtcgacgatcatatcctcctggccgccgaccatccgccgcttgcccagctcgacgagaatatccaccgcgctgaggccatagcgcttggccgccgcttcgctgtggcgcaggaagctggagtagactccggcgtagcccagcgccagcgtttcgcggtcgacacgcaccgggcgatcctgcagcggccgcaccagctcatcggccgcgttcatcagggcgtagagatcggtgccatgctgccagccgagcttgtcggcggcggcaataaacacctccagcggcgcattgcccgcccccgcccccatcccggccaggctggcgtcaatgcgatcgcacccctcttccaccgcgacgatcgagttcgccaccccgaggctcagattatgatgggcatgcatcccggtggcggtctccggcttcagcaccgccttcagggcgcggaagcggtcgcgaatgtcgttcatgttcatcgccccgccggaatccaccacatagatacaggtcgcgccataagattccatcttcagcgcctgctgcgccagcgcctgcggggagatcatatggctcatcatcagaaaaccgacggtgtccatccccagctcgcgggcaaaggcaatatgctgcgcggcgacgtccgcttcgctgcagtgggtggcgacccgcaccacccgcgccccggcctgataggctgctttcagatcgtgcagcgtgccgatgcccggcagcagcaaggtggcgattttcgcctggctcacgacatccgctgtcgcttcaatccaggcgatgtcgctgtgggcgccaaagccatagttgaagctggatccctgcaggccatcgccatgggccacttcgatggagtcgaccccagccttatccagcgcgctggcgatctgctgcacctgcgccagggaatactggtgacgaatggcgtgcataccatcgcgcagcgtcacgtccgagatataaagttttttaccgttcatgctgtcgctcccgccgcgctgtgcattgccccggccatttgctccgccgtcgccagcgccgccgaggtcataatatcgaggttgcccgcgtacgctggcagatagtgcgccgccccttccacttcgaggtaaaccgcggttttcaggccggaaaaacagccgacgccgggcaggttgaccggcctgtcctcggggataacctcaaactgcacctgctgcttcagccggtagcccgggacgtaagcctgcactgccgccgccatttcggcgatcgaggcggcaatcgcctcctgcgacgccagctcgctcaggacgtagacggtatcgcgcatcatcagcggcggctccgccgggttcagtacaataatcgctttgcccttgcccgcgccgccgactttttcaatcgcctgcgaggtggtttcggtaaattcgtcaatattggcccgcgtgcccggcccggcggattggctggcgatcgaggccacgatctccgcgtaatgcaccttcgccactcgcgagaccgcggcgaccattgggatggtcgcctgcccgccgcaggtcaccatattgacgttgccctgatggagattggccgcgaggttgaccaccggtacgcagtatgggccaatcgccgccggcgtcaggtcgataacgcggatccccggcttcgcttcgcgcagcgcggcatcgtttttgatgtgcgccccggcgctggtggcgtcaaaaacaaaatcgatgtcggcaaattccgccatctgcatcaggccgcccaccccttcgtgagtggtcgcaacgcccaggcgcctggcgcgggccaggccatccgactgcgggtcgatgccgaccatcaccgccatctccagatgctggccgtggcgcaggattttaatcattaaatcggtgccgatattcccggagccgataatggcgactttacgtttacgcatcacgatctccttctccggcggcaacgaagcgtgccgcgactgagccaataccttcgatatgggcgacaaagctgtccccctcgttaatcgtcaccatcgggcctaacgccccggtcagcacgatatcccccgcccgcagcggttcgccgagactcgccagcttgcgcgccagccagactgcggcgttcagcggatgccccagacactcgctgccgcggccgctggagaccagctcctggttgcgggtcatgtgcatggcgcactgcttcagatccagtcccgccggacgctgcgccgggccgccaatgacgtacaggccgcaggaggcgttatcggcgacggtgtcgacaaagccgattgaccagtcgcgaatgcggctgcccaccacctccagcgccggcaatacccattcgatggcgttatacagttcatcaaaagtggtatcggcatgcggcagatcctgcttcagcaccagggcgatctcggcctccaccttgggctgcagcacgcggccaaacggcacctcggcgttgtcgccgtagcacatgtcggcaaacagggtgccgaagtccggctgattgacgcccagctgctgctgcactttgggatgggtcaggcccaccttgcggcccaccacccgccggccatgggccacatggtgctggacgttcaggcgctggatggcataggcggcgtcggcattgtcgacgccgagaatatcgcgcagcggggcgatcgcctggccgctctgttccgcgtcgcggagctgccgggccagcgcgtcaagagaaaaagtcatcatttactccttaagcccgtgcgaggaaattgagcaccagctgattaaaactgtcggcatgttcccactgcgcccagtggccgcagtcgcggtaaatatgcagttccgaaccggcgatcccggcgagcaggcgcaacccggcgtccatcggcacgaagcggtcattgcgtccccagacgatcagagttggcgcgctgatttcgcccagccgcgggccaaagtcaggaaactgcttcgggttggcttccaggctcttgacgaagttgtccagatggtcgcggcgcgacagcatattgttgagacgcgcctcgaacagcgcctcggtgaggtcgcgggtgtcgaagacgaagatgctcatcatctttttgaggttttcaatggtcggctcgcggtacagggcgttcagcagcttgatgccctcggtcggcattggcgtgaacaggctcatgccgccggtccccccgcccatcagcaccagctttgccacccgctccggccagctcagggtgaaggccaccgcgctatggccgcccatcgagttgcccagcagatggactttatcgatccccagctgatcgaccacgcttttcagaatgcgggcgttgaggtccgaacgcgagccgctgttgacgatagcatcgcttttgccccaccccggacagtcgaggagcagcacgcgatagcccgcctcgaccagcgggtcaatattgcggctgaagttggcccagccggtggcccccggcccggagccgtgcagcatgaccacggtctctttcccgtcgccgcagtcattgatatggatgcgcagcgtgcggcccccctcgtcgacattgaggaatcggctggtggcggcttcagtttgcggttgatagctcatgttagtctcccggttaatcaaatctcggtggtggcgctcagcgagccgaatccggcgatccactcggggatcggccggtaatagcggccttcactgcgccagcggccaaaagcggatagcgcggcaaaagcggccacccaggtcttaatttcgtgcgtcgatttcccggccatcgccgacagctcgtcattgccgatcgcgtccagttcgctcagccgcccctgctccagcaggctcataaagcggttgtcccagaccgggttgaggggatggagcgagtgggggtcttcggtaaaccgtcgggcggcattgatcacccgctgctggcgccgttcgcgttcgtccggcggcagctgctttccgccgccgagcaggcgatcgcgcagatgggcgtcggccttcgccagctccggcaccggcggctggtgcgagagtccgcccgagccgaggatcagcacccgcttattgagggtattgagaaagcggcccatcgcctcgcccagcagccgggtgcgttgaaaacccggcagcggcgcggcgacgccgttaataaacaccggcagcaccggtacgcggtccaggccacccagcagaaactccagcggctgggcgaagccgtggtccacctgcatgttgtacgacaccgccaggtcaataccgctgttgatcacggcgtgggcgcaggcttccgccagctcggtcggcaccggcaggtcgccggcggcgctggcgaagtcgccaatcgcggtggcgccgaccccgaggcagaacggcggcatcacgtcatagaaaaaaccgttgtagtgatcgggggcgaagagcaccaccagctctggattgaattcagcgatccgccgccgggcgtcggcaatcaccccgttcacttcatcgaggaccgcctgctccgggtccacgaatcccaccagcggagtgtgggagagacagtgcaaataggcatgcatatcaggccaccttctcttctgcgtgggcagtttcctcgattgcgagggtcattttttccgccagggcggtcagctgcgcgccgagggtctgcgggatggcgagagcggcgacaaagcggtccggtctgaccacggcgatggcggtgttatgctgagcaaaccagctcttcaggcgattttgcctgtcgcccacccgcagcgtgccgggggcgttatcctgctcgcggtggatctgcacctccggcaccacctggataaagcgcacgccaatcgcgcgccagcgggcgatctgcccggcgttgagcccccactgcgggttgcagccccagccgataatggcgaaattcgcgccgatgacgtcgtcgagcagcacgctctcgccgctctccagcgtcacctgcggttgaataaacattttgcccaccggcgaggtcttgccggcgccgtcggtcagcagcgccccctcgcggtactgcggcatcggcttaaagcgcatctcgaggaagtagcgcttcaccggcggcaggtaattcagcagccaggagagaccgtcgcgcacggccccctgccagcgcttcggcggcgccagcacgtagccggcggtgaccgacagatcaatcatcgctttcgcgtggtcgcggcgctcctgctggtagctgtcgagcagcgcctctcccgctttaccgttgaccaccagcgccagcttccacgccaggttgaaggcgtcgcgcatgccgctgttgtacccctggccctgccagaccggcatgatgtgtgccgcatcgccggccagcagcacgcggtcgatgcgaaagcgctcggcaaggcgggcgttatgcgtatagacccgctggcggatcagctcgacgcgatccgggtccggcagcactttgctcagcaggcggcgcatattgtgcggttcgctgagctgagcttcggtttcgccgggcatcaccataaattcaaagcggcgcacgccgtggggcagcgcggcggaaacgtagggtcgcaccgggtcgcagcacaggtaaacgtgcggggtggccagcgggtcgttagcgatatcgatgacgatccactgattcggcgcggttttaccttcgaaggggatgttcagcgtacggcgaataaagctggcgccgccgtcgcaggccaccagccagtccgcgcgcaccgtctcccgctcgccgtccggtcctttaagatttaacgtgacaccgtcaccggtctggctaaaggcttccacttcgcgggagaagaggcagcggacctgcgggaaacgctgcagaccgtgatacatcaccgcatcgacctgcggctgaatgaaggcgttgcgccgcgaccagccaaactcatcggtcatcggctggatatcggcaaagcagcggccttttggggtgagaaaacgcatggcgtgccacggcgtggtatgcggcagcacgtcattcaccagccccaccgcctgcatcgcccgcagggattcatcgtcaatgccgatggcccgcgggtaatcgatcagtgtggcgagcttttccaccaccagcacgctgatgcccatctggccaaggtagttggccatcatcagaccaaccggaccggcgccaacgatggcgacctgagcggtatgctgcacggcgggttgaatatcgggtgtagatgttgtcattctcagcgacctcacgactcggaaactgcccggctgacaggcaatttgttaatcatgtgtaaacgtatttttataatgggctgagtatagggcgggggttttcggctacaatcaaaacatcatcgaatgtgcaccaggtgcacagcactgtttttaaagcattttaatggaggatttatgcgtgacgatgagtccgcagcgtacaaaacggtgcgcggattaagccggggtttattgttattaaaattgttaaataaattcgacggcggcgcgacgccgggcctgctggcggagtttagcggcctgcatcgcaccaccgtgcgccggctgctggagacgctacaggaggagggttttgtccgccgcagccgctccgatgacagcttccggttgaccattaacgtccgccaactgagcgatggatttcgtgacgaacattggatttctgccctcgccacgccgctgctcggcgagctgctgcgcgaggtgcagtggccaacggacatcaccaccctcgacgtcgacgccatggtggtgcgcgagactacccaccgcttcagccgactgtcgtttcaccgcgcgatggtcggacggcggctgccgctgctgctcaccgcctccggactgacgtggctggcctttgcccccgacgcggaacgcgacgccatcgtcagcatgctggccgcccgtccggaagctgagtatcagttggcccgcgaaccggaacggctggcggcgatcctcgcccgcacccgccagaacggctatggcgaaaacttccgcggctggcggcaggaggagaaaatcgcctcgatcgccgtgccggtctgcagtcagcagcgggttatcggctgcctgaacctggtctatatcgccagcgcaatgaccattgagcaggcggcgcagaagcatctccctgcactgcagagggtggcgaggcagatagaagcccgcatggaagaggaagaagtgtggtacgaaatgccctgatcgcgatgaggataaatgcgatcgcccattgcgcccggcttcgttatataatttaatacacaacgaattttcacgccattcgggccacaccatgtcaaaacaccccttactgctgggcctgacgctgctcagcgccagcctgttcaccggccagaccttcgccgaccgcaccgtcaccgaccagctgggtcgccaggtcaccctccccgaccacgtcacccgcgttgtggttctgcagcatcagacgctcaacctgctggtacaactgcatgccgccgaggatatcgtcggcgtcttaagcagctggaagaaacagctcgggccgcagttcgcccgctttatgcccgagatcgggcaactggcgaccccgggcgatctcacccaggtcaatattgaaagcctgctggcgctgcgtccgcaggtggttttcgtcgccaactatgcgccgccggcgatgatcgcgcagatccaacaggccgggatcccggtggtggccatctcgctgcgccacgatgccgccggggaaaaaaataaaatgaaccccaccatggctgacgaagagcaggcctataacgccgggctgatggaggggatccgccttatcggcgaggtggtcgagcgccagcccgaggccgaggcgctgattcactacaccttcgaggcgcgcaagcaagccaatgcgccggtggccgatattccccagaaccagcgggtgcgggtgtacatggccaaccccgatctgaatacctatggcgctggcaaatacaccgggctgatgatggcgcacgccggggcgctgaacgtggcggccgccagcgtaaaaggcgcccgccaggtgtcgctggagcaggtgctggagtggaacccccaggtgatcttcgtccaggaccgttatccgcaggtggtcaaacagatagagaacgacccgcagtggcagacgatcgatgcggtgaaacatcaccgcgtgtggctgatgccggagtatgccaaagcctggggttacccgatgccggaggccctggcgctgggtgagctgtggatggcgaaaaaactctatcctgcgcgctaccagagcatcgatgtggacagtaaagccagggattattatcagcgtttttaccgcgtggcgtggacgccagatgcccgctaactctcagccctggctggtgcagggaagcctggcgctggcgacgctggggatcgcggtcgcctcgctctgtttcggccagtacccgttaagcctgagcgccgttggccacaccctggtccatctgccgccaggtgaaggggtgatcgggcagatcgtctggtcggttcgcctgccacgcgtggtgatggccctgctggccgggggcgcgctggggctgtgcggcgccaccttgcagggcgtgttccagaacccgctggtggacccgcacatcatcggggtgaccgccggctccgcctttggcggcacgctggcgatcctgttgggcgtcggcagtctgctgatgatggcctcgacctttttcttcggcctcgtcgcgctggggctgatttacgccctcgccgccctgcaggggcgggacagcacgctggggctgattctgtccgggatcattctcagcggcttcttcgccgcgctggtcagcctgatgcagtacctcgccgacagcgaagagacgttaccgaacatcgttttctggctgctcggcagcttcgcgaccgccagctggcataaggtactgcttatgtccctgcccctggcggtggctgccggggcgctgtggaagctgcgctggcgtatcaacctgctggccctggaggaacgcgatgcccgcagtcttggcattccggtggccgcgctgcgtcgcggcgtgctggtttgctgcgcggtgctggtggcagcccaggtggcggtcagcggcagcatcgcctggatgggtctggtggtcccgcacctcgcccgtctgctggtaggggctgaccatcgtcgcctgctgcccaccgccttctggctcggcgccgcgctgatgctggtggtggacgatctggcgcgtacgctgacccaggcggagatcccgatcgggatcatcaccgccctgctcggggcgccgctgtttaccgtgttgctggtgcaatcccgacgccggagtacgacccgatgaacagctcattatcgctgcaagcgctacgctacggccaccgtcagccgctcttcgccccgctcacgctggcctgccggcccggtgagatctgggcggtgctgggcgccaatggccggggaaaaagtaccctgctggataccctgaccggcgtgctgccgccgctgggcggcgagatgcagtgcgagggcggcgtggccctggttccgcagtcgtttcgtcccgcttttcgctggcgcgtgagcgatgtggtgctgatgggccgggcccgtcacgtggatctctttgcccagccggacgaggagaatgcccggcgggttgagcaggcgctggcgcagctggggattgccgccctggccgaagatgacttcggcgccctctccggcggccagcagcagctggtgttgattgcccgcgcgctggtcagcgccagccagaatatcctgctggatgagccctgctcggcgctggacctcggtaaccagcaggtggtattgcagctgatcggcgacctcgcccaccgccaggcgcgcaccgtcctgttcaccacccatgatcccaaccacgccctacaggtggccagccatacgctgcttctgctgccggagggccggtggctggcgggcgagaccgccgacgtgctgagcgaaacgcatctccggcaagcgtacggcctgccggtacgcctgatccgccatgccgcctccgcgttccctctgctggcgccggggtttacgctgcgtcgctgaacggcataaaacccgcctgccggagatacccctggccaacgtcgtcgaggataaagcgatacagggccagcgcggcgggatcggccctgagacgcgccagctggtaatcgcagcgaatattccacggcgccgggatggtcagggtacgcagatcgtcgcaggtggccagcgcggggccatagtgcgcatagccgataaacagatccgccagattctggcgaataagccacgcgccggctatctctcccggcggcacgctcagtgagtctctgccgccgaccagctgctgcgcccgcccggccatcgcgttgcccaaccctggatagcgtgcctcaattcgggcgaacagctgccaggtataatctcccgacggatcgcagcccggcgtggaggtcgccaaccgcaggcggggcgtgctgagcagcgccagccagtccaggccatcgttgtccggcgaccgccgggcggtcagcatcagctggttgctggcaaatccctggcattcctgcgccagacccgcctgcagcagcgcctgcgggtgcgccgcgttggcggaagcaaaaaccgcgcacggcgacccggcttcgatccgctcgcgcagcaggccggcagggccaaactgcgcatcgaccgccaggccagtgtgctgccgaaagtgcgccaccagcggcaggaaggcgcttctcaggcttcccgccgccagcagcgtgagagtggtatttgccataggatatcgctataaaccggataatatagcgctatattacccggtttgccgtcgcgtcagtagcgaatttctgccagggtccgcagctgctcgggggtggctaccggtaggtcaaaaaagcgcagataggcagggatcatttcaaacagcatgtcggtcccgcgctggatgtggcactgtcgtgcctgagcggccctcagcagcggggtgtactcctgagtcatgacgacttcccccacccaggcgcctggcgccagacggtcaacgtccagcggcagcggatcgctggccttcatccccagcggggtggcattgaccaccagctcgtgtccggcaggatcgggctgcatcagggtgatatcgagctgcggatagtgctgatgcagccgcccggcgagggcgtgcgccaccccgggccgggtatcgtacagggtcagggcgctgacccccgccgccgcgagggaggcggcgatagccgatcccaccccgccgctgccaaccaccagcgcccgcgtcccctgcgggttaaaccctttacgacgcaggcccagcacaaatccctcgccatcgaacatgtctccgctcaggctaccgtcagcctcgcggcggatggcattgcaggcgccagcgatggccgccgtcgggctcaggcgctgcaccagatcgcaggtggcgattttatgcggcatcgtcaccagcgcgccgatgatgttggtcatcgtaaacagcggcggaataaacgcggcgtagtcctccggcctgacccccatcggcaccaccttcacgtccacctgctggtcaacgaaccacgggttgtagatcatcggcgccttaaaactggcggtcggatagccaaggtgcgctatcagccgcgtattcccactaatcaccatgccttgctcctttgcttactgcgataactcgatacgtttgacgtcgccgaggataaacagataggccaccacgcccagcagcgcggcgccgccgatgtagatcaaggcgtagaagaaattgccgaacccggcaacgataaagccgatcaccagcggggtgaggatccccgcgaggttggcgcagaagttaaacaggccgccggtcaggccgcccagccccttcggggcgatatcggagatcagcgtccagccgagacccaccatcccctggccaaaaaaggcaaacgacatcaccaggatcaccgccaggtcgctctccagccagttggcggtaatgatgcagctggccatcagcaggccggcaacgatcggcagcttacgaccgaggttggctgacccggtagctttcagcaacttgtcggagagccagccgccaaacatcaccccgccggcggcggcgacaaacggcaggatggagaagaagccaaccttcagccagggcatatgccgctcggtggccagccaggtggggaaccaggtgagaaagaacaccagcacggtattgccggcaaactggccgatactggcgccgatgatctgccgtttgctcagcagctggcggaccagcggccagctgaacgccacctgctggtcggtcggggcgctgaggccgccgccgttttcgatatgctcgcgctcctgctggctaaggcgcggatcttcatgcggttcgcggtagcagcgccaccacaccagggcaaacagaatgccgacggcgccaacgctgacgaacagcacccgccagccgaaaccgtccatgatccagaacagcagcggcgcaaagcaggccagcccgagatactcccccacggtgtacaccgccgtggccttcgcccgctcctgctgtgggaaccaggcgctgaccacccggctgttgaccggaaagcacggcgcttcgctaatgccgagcccgaagcggcacagcagcagcgtcttcagtcccaccgccatgccgtggaacagggtaaacagcgaccacagggtcagtgacaaaaagtaggtcactttgttgccaaagcggtcgagaaataatccgccgggtatctgcgccagagcataggtccaggcgaaggcggagaagaggattcccatgatcgccgggtcgatccccagctcagcggtgagctttggggcggcgatccccagtacggtgcgatcgagatagttgatcatggtgccaatggccaacagcgcaagaatgccgatacgccgccgggaacggcgcacggtaacggctggctgggcggcagccgtcgggttagggctatatgagctcatagtcggttcctgtctcgggtacagagggtgttgttattgtgtttaacgcataatgaaccatttgattcaggctaacaatactgcatcgccgccagacggacggccgcattcgctgcgccatagagcgcatagccagcccggcgctcggttaactcaaagaaaaagcggccggcggtaaagggccgggtgtaaagatgcaggaaatctcccccctgcggatcgcggtcatagaggagctgctggcgctgaagctgcccgacgtccaactctccgccaaagcgcgccagcaaatcgtcataataattggccgggatcggcagcgtatggcgggcaacctcggcaagctggtcgcaggcggccggcagatcgcggcaggcaaaggcggcatgctgcagccccgccccctggtagcaggcaacggagcgggcgatctgcgtcgcccggctctgcgaaatattcagcgccagacggatatcgccctgcgggctgcgcaccgccaggctgcgcaccagtccatacgggtccggcagcgtctgctcatgctcaagggaaaaaccaaacaccgtacggaagaacatcacccagttatcgcggctgtcggcctccattcccagcgccagatgatcgataccgagatagtcctcgcgcaccgtcacgccatcacgcagatgaaaatcgcgctcgtagatagcctccccggcgtcgatgagatagataaggctgccgtcgggggcgcagatcgccgggatcggcgtttcgttcggcccggcgtcgccctgccaggtggcataccccagcgcgcgggcgcgggcgacaagcgacgcgctgtgctcgacccgcagcgccatcgcgcagagcgataccccgtggcgttgataaaaatggtcggcccagctgtgcggctgatggttgatgacgatccgcgccccgccgttgcgccacagcgtcacctgtctggagcggtggcttccctcgtgctgaaaacccagcgcctgcagatgttgccccaggcgctgcgcctcggcggcgctggcggcaaactcgataaactccagcccgtgatagaccggcagcggcggcggtgaaaacagataggcatcgcacgtcgggagccgacggcgggtttgctcctccagccacagcagcgaacgataaccatctttggccgtcgcaccgttcggcgaggcgcgaaaaccgtcattgaagatctccagcgaccaggggccgcggtagccacagcgggtgatctgctcggcaaacgcctccagcggcagctccccctgtccgggaaagcagcggaagtggcggctccactccagcaaatccattttcatatacggcgcatcggcgagctgtacaaaggtgattttctccaccggcaccgacggtagcgcgtccagcgtgtcgccgcgggccagaatatggaagctgtcgagcaccaggcccaacgccgggctgtccacccgccgcacccgctcccaggcctgctgccagcggttcacatgggttccccaggccagggcctcatagccgatagcgatcccctcctcttccgccagcgtggccagcgcccgcaggtccgcgacctgcaattcgctatccgccgagcagtccggctgcacattgctgcacagcagcagcgtctcgcagcccagctcgcgcatcagagcaaacttgcgccgagcgcgggccatattcgccgcaaactgcgcccgactggcgccttcaaaatcgcgaaagggttgaaaaagcgtgatttttaaccctaaatcggcggcaagctggcggatttccgccggcgtccccgtataatagagcagatcgttctcgaaaatttccaccccctgataccccgccgccgcaatagcgtgcagcttctcaggcagggtgccggaaatcgaaacggtggcgatagagcgcagcataaggtcctcgggtcaacagctgacgtaagccttgaatatgtatcatttggttcatttgcgccatactaggttgctaaattgtgatcattatgtgtattttttgtcacccaagaaaaaggagttgccatgaccgtcgttgcccatgatgaagcacaatccctgaaggcgcggatcttcagcgccgctatcgctgtctttgctgaacacgggctgtcaggcgcccgcatggagcagatcgccaccgaggcgcagaccaccaaacgcatggtggtttactacttcaaaagcaaagaacagctctatcaggaggtgctgcagcatgtgtatgcgcggatccgcgaaaccgagcagcagctggggctggagaatgtgccgccggtggaggcgctggtgcggctggtgcgctggagcgtgcgctatcacgccacccatgcggactatatgcgcgtcatttgcatggagaatatgcagcgcggcaagtggttaaaaagctcgggtgaactgaagccgctgaatcgtaccgccctgtcgattctggaagacattttactgcgcggccagcagcagggcgtctttcaggcggggctcgacgcgcgcgatgtccaccggttaatcagcagcttcagcttttatcaggtgtcgaacttctacaccttcagcagcctgtatcttgacgatccgctacccgccatcgacgatgaagcgatggtggctcaccattgtgacattgccgtcagggcggtgatccgcttcgtgatttcctgacccgccggcgtaagggatcagtgcccggaaagcgcatgaatgactttctccatagcctccacggtgagcggcgaacgctggattttgcggttcgccagcgaggtgcgcagcacaccggcaatgacaatgtgtttcggctcctgacccaggtcacgcatttccagcacgactttacccaccacgcggcacatttcctggtacaggtcgtcgtctttcgctttatttcccatagaatttggctcgtattttatcattatcaatcaaatcattattgatagatttcccgcacaacgcaaaccatcgccactttaaaggttcaatgacgcattttaccggctcatgatggcgaaataatccatttcttttactctttttcatagccggtgacgaaaaagtgtgttgcgtagatttttgcataacgtgccggttttgttacgcgttttgtccataatttgaaacgaggtttttattttcctttttgatttcggcagcgtaaaatgcgcttcgattctttcttgaatggtttcagcgcattggactgcatgataaaacgcataacaccttgccacatttcatgggctgaaccgccagcacacattcttctgcacgcttcagggttgtcacctatccttagggcgtggcttagcaactttcgtaatacaggtttggctccccggcagtgcgcccgcggagcgagaattccatatccttcacaacttaaagactaaaactgtcatgaaaaagaccaaaattgtttgcaccatcggtccgaaaaccgaatctgaagagatgctgaccaaaatgttggaagccggcatgaatgtgatgcgtctgaacttctcccacggtgactatgcggaacacggtcagcgcatccagaacctgcgcaatgtgatgagcaaaaccggtaagaaagccgctattctgctggacaccaaagggccggaaattcgtaccatcaagctggaaggcggcaacgacgtctccctgaaagcaggccagaccttcaccttcactaccgataaatccgtcatcggcaacaacgaaatcgttgcggtaacctatgaaggcttcacctccgacctcgccgtcggcaacaccgtcctggtggacgatggcctgatcggtatggaagtcacggctatcgaaggcaacaaagttatctgtaaagtgctgaacaatggcgacctcggcgagaacaaaggcgttaacctgccgggcgtctccatcgccctgccggcgctggctgagaaagacaaacaggatctgatcttcggttgcgaacagggcgtggacttcgtcgcggcctccttcatccgtaaacgttccgacgtcgtcgagatccgtgagcacctgaaagcccacggcggcgaaaacatccagatcatctccaaaatcgaaaaccaggaaggcctgaacaacttcgacgaaatcctcgaagcgtctgacggcatcatggttgcgcgtggcgacatgggcgtggagatcccggttgaagaagttatcttcgcccagaaaatgatcatcgaaaaatgtatccgcgcgcgtaaagtggttatcaccgccacccagatgctggactccatgatcaagaatccgcgtccgacccgcgctgaagccggcgacgtggctaacgccatcctcgacggcaccgatgcggtgatgctgtccggcgaatccgcgaaaggtaaatacccgctggaagcggtcaccatcatggcgaccatttgcgaacgtaccgaccgcgtgatgaccagccgtctggacttcaacaacgacaaccgtaaactgcgcatcaccgaagcggtgtgccgcggcgcggtagaaaccgctgagaaactggaagcgccgctgatcgtggtcgccacccagggcggtaaatccgcacgcgctgtgcgcaaatacttcccggatgccaccatcctggcgctgaccaccaacgaaaccaccgctcgtcagctggtgctgagcaaaggcgtggtaccgcagctggtggaagagattgcctctaccgatgatttctatcatctgggcaaagacctggcgctgaagagcggcctcgcgcgtaaaggcgacgtagtggtgatggtttccggcgcattagtgccgagcggcacgactaataccgcttccgtacacgtgctgtaataatttacaggttaattggttttttttaataaagcgcctcgcggggcgcttttttttattcattgattagctcttcctattaaaaatgcaaatcggaatttactatttaataagggattatctaagatgaatccgatggaagcgcgctgttttcactcgcctttttcagcgattctgagcaattcgatgcttctttgagcgaacgatcaaaaataagtgcgttcaggtaaaaaaaatattctcatcccaaaaaactttgtgtaatacttgtaacgctacatggagattaactcaatctagagggtattaataatgaatcgtactaaactggtactgggcgcggtaatcctgggttctactctgctggctggttgctccagcaatgctaaaatcgatcagctgtcttctgacgttcagactctgaacgctaaagttgaccagctgagcaacgacgtgaacgcaatgcgttccgacgttcaggctgctaaagacgacgcagctcgcgctaaccagcgtctggacaaccaggctcactcttaccgtaagtaagagttctggtaataaaaatggcgcactctgtgcgccattttttttgccctcagcatgagggctattgggtaagcagaccgttgtcagacgaactattttgcgccgacagcgacgtcgccgtgctacctgcccccgccgacaccaccaccggataccccgcccttctcgacatcgcttttttcaactgcaggtcatccactgctttatcctctgcgaaggcgtgaaacgccgctggcagcgtgtaagcgatggtccgggtgttttccccttcggtctgcgaaagcggcctgtggacttcgacatagcgtttaccatccggctcgacggcaaacttcaccggctgattgataatccgtaccggcgtcccggttttcacctggctgaacagcgctttgatgtcatcagcgttcatccgcatacagcccgagctgacgcgcagaccaacgctgtctggggcgttagttccgtggatgagatattcaccgttaccgtaggccagacgcagcgcatagcggcccaggggattgttcggtccggccgggaccaccgctggcagcgtcagccctttctccagcgagcgcgcgcggatgccggcggtaggcgtccaggtagggttagggatcttctgccccacgcgggtggtcatctccggcgtttccagacctaactggccaatgcccagcggatagacctgcacctgattctctcccggcgggaagtaatacagccgcagttcggcgaggttgacgacaatgccctccctcggcacgtcgggcagcagcatctgagaagggataaggacctgagtgccgggcttcggctgcaccggcgcaatcgtatcgttggcttcgaggatcagcatcgccgcggtatcgaaatggcgcgcaatcgcctgcaggttgcgatctccctcctggaccgtccagtactgattctgaccaatcagccgactgttggcgggaggaagcggataatcaacggcccaggcggccgaggaggcgccaagggcgctgagaagggctaaggtgatcatcgttttgcgtttcatactgagattccttctttcgctgataaaacgccaggagactgaacggcggcagggtcagcgccctgccggacgtaacagaatgaaatcgacctgtttattctagctaatatttgccgctttcgcgcgtatcgcgcggatcatggcttcgaggccttgcgagcgggagggggtgagatgctgggtgagcgccattttttcaaaccacggacgcacgtcgaactcggtgatgtcctgagcggtcatccggtcatagaggataaacaccaccgctatcagacccttgacgatcgccgcatcgctatcgccgcgcagggtgatcacgcctgtgggatcctggtccatcacgatccagacctggctttgacagccctgaataatgttctgcacgctatgttcttccgggcttagcggcgccagacgctggccaagctcgatgatatagagatacttctcttcccagttggcgcaacggctaaagttacgcaacagtttgtctttgtccggtagtgccgccattgtcccgtcctttaccctaacagtttgcggatccgctggaggccggccaccaggcggtccacctcttccgtggtattgtacatcgccagcgatgcccgacacatagccggtacctgataccgggccatcaacggcatcgcgcagtggtgtccggtccgcacggcgatcccgtagttatcgaggaagctgccgacgtcataggcgtgatgctgaccgaggttgaaagcaattacccctttacgctgcgccgggccgtaaaggatcagatccggtaccgcgcgcagggcatcgagcgcgtagcgcatcagcgtctgctcatactcggcaatctgcgtcagtcccagctggctgacgtaggtcagcgccgcgccgaggccaatgatccccccggtattcggcgtgccggcctcaaagcgccacggcgcctgattccaggtggtgccctccgtcaggctgacggtggcgatcatcgacccgcccccttcccaaggcgccatcgtctgcagcagctcggaccgggcgtagagcacgccgatcccggtcggcccatacagcttgtgggcggagaaaacataaaaatcgcagcccagcgcctggacgtccaccgggtggtgcatcaccgcctgggcgccatccaccagcactttcgcgccatgctgatgcgcaagagcaatcagcgccgccagcgggttttccgtccccagcacgttggagacctcggttatcgccagcaggcgggtgcgcgggtcaaacagtcccgggacaacatccagttgcagcgtaccgtccgggttcagggggatcacccgcagctcagccccgacgcgggcgcacagcatctgccacggcacaatattggcgtggtgctccatttcgctgatgatgatgttatccccggcgccgacgttggcgtttccccagctgttggccaccaggttgataccctcggtggtgccgcggacgaacaccacttcctccgccgacccggcgttaaggaaggtggccacctgctgacgcacggcttccatccgcgcggtggcttccgcgctgagggtatggatgccgcggtgcaccgccgcgtagccgtggcgatagaattccgcttcggcgccgatcactgcctccggcttctgggcgctggcggcgctgtcgagatagaccagcggctgaccgttgacctcccggttcagtaccggaaaatcggcgcgaacctgttctactgaaaatgtcatacagtgcctcccggcaaacgctgtccaatacgcgccagcacctgctctctgagcgcgtcgctgcggatagcctcggtgagctcggcggcgaaggcgtagaggatcatctgctgcgccgcctgctgttcgatacctcgcgagcgcagatagaacagctgctcttcgtcaatgcgccccaccgtcgccccgtggctgcatttcacgtcatcggcgtaaatttccagctgcggtttggtgtcgacctccgccagccgcccgagcagcagattattgttggtcatctgaccgtcggttttcagcgcgagcggcgcgacgttgatcagcccgttaaacaccgcccgccccttatcgctgacgatggttttgtgcagctggcggctggtgcagtagccgacctgatggtcgagccaggtgcggctatcgcagacctcatttttcaccggcatcgccagcgaattgaggcgcaggttgctgttttcgccgcccaggcgggtgctggtctggtgacgcagcacctggccgccaagcaggaaactgctgctgaaggccgaggcgtcgcggcccagcagcaggtcgttatgggcgaagtgatagctgcgggcattctcaaatgccagcttgatatgctggaggtgcgcgttatcggccaccgtcatggtcaatcgcccgccggtgaaatgcggctgctcattgaggctcaggtaatgctcgacaatcgtcgcctccgccccgctctccagcgccaggtgatggcgatagtgggcggtattcagcgcatcgccggccaggccactagtgatatgcatcagcagcagcggtttatccaggcggcggttgcgcggcacgcgaatgcgggtcaccgtctgggccaggctttcggtcagatggagaaacacctccggctgcagggcatccggcagatgctggcgctgattatcgacactgacctccacgccgctggcggcaagatcgtcgctcagctgaggatgatagcggccatcgataaacaccagccgccaggcgtccagcggcagcgccagcgcatcacgctgttcagcactgagagaggccccctcatcggcgacaaagcgaccgttaagtagggcatccagcggagtgtatttccagtcctcgtgcttgcgcgtcggcagcccaaggcgcagcagctgctgcagatgctgactggcctccggggtacgcgggccgccctgcgcttcaaacagatggtgccactgctgcagcgcgttactgctgttcggtaagccagccatagccctgctcctccagctgtttgaccagagagaaatcgcccgacttcacaatccgcccctgatacaacacatggacatagtccggcttgatatagtcaaggatgcgctgatagtgggtgacaatgataaaggcgcgtttgccgtcgcgcagggcattcactccctgggagacgattttcagggcatcgatatccaaccccgaatccgattcatcgagaatgcacagctccggctcaagcaccgccatttgcagaatatcgttgcgctttttctcaccgccggagaagccaacgttcaccgagcgggtcaggagatcttccggcatctgcagcagcttgatcttttcttccattaagtcctggaaatcgaaacgatccagcgcctcctggccacgatagttgcgcacggcattcagcgcagtctgcaggaaaaactggttgctgacgccggggatctctaccggatactggaaggccataaagataccttccccggcgcgatcttccgcagcgagttcgagcaggtttttgcccttaaattcaacgcgaccgccagtcacctcataatcttcacgcccggccagggtggccgaaagcgtacttttgcctgagccgttcggccccataatggcgtggacctctcccgggcgcacctcaaggttcagcccgcgcaggatcgctttatcttcgacggcgacgtgtaaatcttgaatacttaacatcttttttccttaattatcagccgacgctatgttcaaggctaatggccagcaatttttgcgcctctacagcgaactccagcggcagctcggagaagacgtctttacagaaaccgttgacgatcatcgagatggcatcgtcttcgctgatcccgcgctgcaggcagtagaacaattgatcttcgccaatccgcgaggtggtcgcctcgtgctccagctgggcgctgttgttgcggcattcaacatacgggaaggtatgcgccccgcagtccgggccgatcagcatcgaatcgcactgggtatagttgcgggcgttggtggcggtcggcatgattttgaccagcccgcgatagctgttctgactgtgtccggcggagatccctttcgagatgatggtcgagcgggtgttcttgccgatatggatcattttggtgccggtgtccgcctgctgatggccgctggtcagcgccaccgaaaagaattcgccgatcgagttatcgccgcgcaggatgcagctggggtatttccaggtgatggccgagccggtttccgactgggtccatgacattttgctgttctccccttcgcacagggcgcgcttggtgacgaagttgaggatcccgccggtgttgttatcgccggggaaccagttctgcaccgtggagtatttcacttccgcgtctttatggatgatgacttcaacgaccgcggcatgcagctgatagctgtcgcgcaccggcgccgagcagccttcaatatagctgacgtagctgccttcatcagccaccagaatggtgcgttcaaactgcccggtcttttcggcgttgatgcggaaataggtcgacagctccatcgggcagcggacgcccttcggcacatagataaaggtgccgtccgaagccaccgcggcgttcagcgcggcaaagaagttgtcattccccggcactacggtgcccagatactttttcaccagttccggatgatcgtggatcgcctcgccgaaagaacagaagatgatcccctgctcggccagcttttctcggtaggtggtcgccaccgacaccgagtcaaatatcgcgtccaccgccacctcgcgcccttcgcgtaccggcacgcccagctggttaaaggcttcttccacctcgctggtcagaaaggtattggccccggtctgctgcaccgcgccaggctcggaggcgcaggtctcatcgcagttgccgcaggagggcgcggaatagtagctgtaatcctgataattcagcttatcgtaatgcgctttcagccagtgcggctcctccatttccagccacgcccggtaggcattcagacgaaactccaacatccactgcggctcattgcggcgagccgagatagcccgaacgacttcttcattaatgcctttggccagctcatcggtttgcaggcgagtaaaaaagccctctttgtagttgagcgggccgccggtccaggttttgacatcgtcagttgcttcagtattacgcgacatagttactccgcctgcaccccaaaactttcgccgcagccgcactcatgctgcgctttcgggttatgaaatttaaagatttcatttaaaccttcccggacataatccagctcggtgccgtcgatgaacggcatcgcctgcagcggcgcaaacagcttcgccccgtcagattcaaagagcagatcgtcgggcgccggctcggcaatcatttcgagcacatagccaaaaccggcgcagccgctggttttaatgcccagccgcagccctttcttatccggctgcttgcgcatcagatcgcggatatgcgcggcagcggccggcgtcatggtcagtccctgccagctgaaatcggcgggattaaaagttcctgcttgtacttccatcgatagacctccaggttggcgccatcaaggcataccgccatgttagtgataatgattatcacttcaacccttctgcagcaggggtattgcctcatttagtgctttttataagcatagaccctcgcccagggattatcagggtgtgcaaatagaacttaatggattgatttataatatgttattttgaaatcattctatctccgcacgcaatggcaaagatgtatcgaaaataccgatttatgcaatagcggcagaccaccttgctggttatcgcttgcaggcgagcataaagtgacaacgtaacagaaagaccatgccagcgcggggcgcggccccggccatgcgctagaaaaaagcgggtagtgaaagcgcccgccggtaacgcttcaggaaaggaataagcgccgctcgccggccgcattcggggaataaaaaccaaaataaaacgggcacacggggctgccaggcgggataccggctggctaggtgcctttactcaccagccgggcggcctggacaaagacctcatcctctaccccgtcccccttctgtctgcccagcctcaccagttcatccacgatactcccctgattaatctgcttttgtgtagccactaagctaatgaccgccgcgccgatggccatgccaatcaatgccgtttgttcatctttatctttcatggtgtcgctccgtctgtcctcctcagaaaggctagcaaaagataccatctgctcaatttcaaattcaccttctttacgtctgacgcaaagcctgcggcagggcacctggcaggagaaaaacaaactaagcggctgattgcaatggcataacactaatgaacaattaacagacttgtgagtcttgaaattattttttagactcattggtctgttaattatcaattgcgtaaaatcttatgcctaattcgaccttatttttcatcaccctttgtttctctcgcgtcctggtgaccttcttcttctggatggcaggcatctacggcgtctttcatttcgcggagatcgttcaggagatggtgaccgtcggcctgccgtggccggtcttgttcgcggcgggcacgattttttgccagctggcgggttcggcgctgatcgtttttaatcctgccggctacggctggattggatcggggatgctgattgtgtttacattactcactattccgctgggacacgccttctgggccttcagtgaaccccggcgcactggggaattccatattgcgcttgaacacattaccgtggtcggaggattaattatgagcgcgctgtttgcaggctatcggcgatgagcgaaacccctcgtcagaaaggtcggccaaaagatccgttgaaaacgcaggcgatacttcaggccgcccgtaagctgtttctggaacagggcctggaggtgacaacggccgaaatcgcccgcgtagccggggtggcgaaagccaccctgtatgccaatttcagcgataaagaacatctgatagaggcggtcttacgccaggaatcggatctcaccatcagcgaccatgatttcgcccagcgccatcatctgccgctgatcgaggtactgacggcgtttggttatcgctttgtccgctttatcaaccagcgggaactgaccggctgggaccgactgatcgcctcggctgccgtgcgtcaccccgatctccccggccgcttttacgccgccgggccggggcgcgcgcagcagatgctggaagcgatcatcgccgaggcgatcgaagccggtactttacgagcctgcgatccgcaggaggctgccgacgaactggccggtttatggctgggaatgaccagcctggcgataaaacttggcgcaagacctccgctgtccgacgacgaaatcaaacagcgggttgagcgcgccctggacgtctttctgcgcgcgtattccctggcgccgggctgatctctccttccccttttcagtgctgtggcctgacgcaaggctgatttattgtgcccaatccgcgcccggcgcaaaaaataatgtccttaccggttagcattaaaagaaaataacaaccacagagtgcaacgcagattattccatgagggaatagtgggaatgctaatatttcatttcctcgccggtttttagaggcctatagtttttttacctgcagaacatccactaaggttaaaaaacataaggacataataatgattgtttcagcccccagcgattatcgcgaagccgctcgtcgtcgtctgccccgcttccttttcgattatattgacggtggcgcggtggcggaaaacaccatgaacgccaacgccgccgagcttgcctcggtagctcttcgccagcgcgtactgtgcggggccggcgaaccgacgctggcgaccacgatccttgatgccccatgggcgatgcccgtggcgctggggcccgtcggcgccaccgggatgtacgcccgccgcggcgaagtccaggcggcccgcgccgcctcccgcgccgggatcccgtacaccttatccaccgtgtcggtctgctcgattgaagaggtggcgagccacgccagcggcgcgctctggtcccagctgtacgtactcaaagatcgcggctatatgcgtaacgcgctggagcgcgcctgggccgctggcatgaaaaccctggtatttaccgtcgatatgccaatccccggctcgcggtatcgcgataaccgctcagggatgtccgggccgcacgccaccctgcgacaatatctccaggcttgcacccatccgcgctgggcgatgaacgtcgggctggcgggcagacccctgtcgtttggtaatatcgaagcctacaccggccacaaaatgaccatggacgactatatggggttcatcagcaacaacttcgacccgtccatcgcctggcacgatctggagtggatccgcgacagctggcaaggaaaattaatcatcaaagggatcctcgatgccgacgatgcgcgcaatgccgtgcggctgggcgccgctggtattgtggtgtcgaatcatggcggcagacagctcgatggcgccatccccaccgcccgggcgctgcccagggtggtggatgcggtcggcgacgatctgacagtgcttgccgattccggggtgcgctccggcgtggacgttatacgtctgctggccctcggcgcgaaaggcgtgctgctcggtcgggcctatatttatgccctggccgcggcgggcgaagcgggcgtggcgcatctgctgcgcttatttgccgaggatatgaaggttaccatgaccctcaccggcgcgacctcgccatcggccatcagcctcgattgccttgatcgcctcgaacaggatcaacaccgcactcatgcggtgccggtatccttacccgcctgacgctgcccgggacctggcctggccatgtgcctcgcccaggtccggcaaagtggaattacctctgaaggtgcaactctgtctgttgtaccgtgttctccggacggatgcggaaccagatcgcgtacatggccggcaggaagataagggtcatgatggttccccccagcgtcccgccaatcagcgtataggcgagcgttccccagaagaccgaatgagtgagcggaatgaacgccaggatcgccgccagcgcggtcagcagaaccgggcgggcgcgctgcaccgtcgcctccaccaccgcgtggaacggatcgagccccgcctgttggttatgatggatttggccaatcaggatcagcgtattgcgcatcaggatccccgacagggcgatcaggcccaccagggcattgatgccaaacggctgattgaacagcagcagcgtcgggaccacgccaatcagccccagcggcgcggtcaggaaaaccatgaccatcgccgacagcgaacgcacctgcaggataatgatcagcagcgtgagggcgatcattatcggaaataacggcaccatcgcccgggtggccttgccggattcctcaatcgaccccgccgtctcgatgcgatagccaggcggcagcgagtcgataatgggctgcagcggcttcatcagcgcggtggagacatccggcggctgcaggttctccgcaacatctccgcggacggtgatggtcggcgtgcggtcgcgacggcgaagcagcgggtcctccatcctgatcgacacgtcgccaatctgtgacaagggaacccgctgcccgccgctgcccaccagggtgaagtcggcgattttcgccggatccagacggatgtcgcccgccgcgcggccgatcacctgcacggcgcgaatatcttcccggacggtggtgatcgggatccctgacagcaggaactgcagctgctgggcgacggactgggagctgagtccgctcgcctgcagccggtcctgattgaggctgaaatgcatcaccggtacccgcgaaccccagtcggtattgacggtgcgcatcagcggactggcctgcagcaccgatttaacccgctcggcgatgtcgagcagagcgtgcggatcgggccccatcacccgccaggcgaccggataaggcgaataagggccaaacaccagctgagtgacgcgcacccgcgcctccggcgccaggccattggccaccgcctcccgcagccgccgcttgagcgcctcgcgggcaccctgcccgtcggtcaacaccatcagtttggcgaaggagggatcgggcaattccggagccatcgccaggtaaaagcgcggcgcgccctggccgatatagctggtgacaatcttcacctccggctgcaggtgcagccagtgctcaattttcgccgccgcggcgctggtctggctaatcgacgacccgtaaggcagctgcacttcaaccagcacttccggacgatcggaggtggggaaaaactgctttttcaccacgctcatgcccaggatcgccacgataaacagcgccaccaccccggcggccacgcgccatttgtgagcaataacccgggtcagcagccgacggaagtgctgatagcgcggggtgtcatacagcgcggcgtggccggccgccgcgggctttctgttcggcaacaggtgcacccccagccagggggtaaaaatcaccgccacaatccaggaggcaatcagcgcgataccgacgatccagaacacattgctggcgtactccccggcggtggactgcgcaaatccattaggcataaagcccacggccgtcaccagggtaccggccagcataggcgccgcggtatggctccaggcataggccgaggctttgaggcggtcgtacccctcctccattttgaccaccatcatttcgatggcaatgatggcatcatccaccagcagccccagggcgaggatcagcgagccgagagtgatgcggtcgaagtttttgccggtcgcctccatcaccacaaacaccacggcgagggttaaaggcaccgccgccgcgaccaccacgcccacgcgccaccccatgctgacaaagcacaccgacatcaccaccagcagggcgacaaagaatttgatcatgaactcatcgaccgcggcgctgatattcaccgactgatcggtcaccttggtcaacgacatgccgagcggcaggctctgattgatgctggtcgtttcggcgtccagcgctttccccagcgccagaccattccagccctcgcgcatcaccacgcccagcagcagcgccggttcgccctgattgcggatcaggaaggtcgcgggatcttcatatccccgctcaaccgtggcgacatcggccagtttcagcgttctgcccccggcaataatcggcgtgtcgcggatctgctgcaggcggtcgaacgccccgtcgaggcggataaagatctgcccgccccgcgtctcgatagccccggcggcggtcagcacattctggctgttcagcgcggcaaaaatcgcctctggtgaaaggcccagggtggcgagacggtcatgagaaaacgagagataaatgcgctccgcctgttcgccgaggatattcacttttttcaccccgggaacatgcagcagctgctggcgcagggcttcggcgtcacgcaccagctgccgcggcggttctccccgtgctttcagggcaaagagggcaaaggtgacatcggcgaattcgtcattcatcatcgggccggagacgccggcaggcagatttttcgcctcgtcgccgagctttttgcgcgcctgataaaactgctccggcacctcggaaggcggggtctgatcctgcagcgacagggtgatcaacgccatgccagggcgggtataggtctccgtgcgatcgtaccactttagctcctggagccgtttttccagcggctcggcgacctgatcctgcatctcctgcgcggtggcgccgggccagacggtaatgaccgtcatttgcttgaccgtaaagggcggatcttccgctcgcccgagtccgaagaacgccaccagcccggcgacggagataaggataatcaaaaacagggtcaccgaccgctcgcggacggccagcgcggagagattaaaacgcccggcgctcatggctggctcccggcggcattatgctcgcgtcgttccgccagacgtaccgcctcgccctggtgcagaagatgggcgcccagggcgacgatcggctcgccgggcttcagcgggccggtcacccgcgcggtttcatcatccaggccgagcacggtcaccggttgccaggagacggtggccggacgagaggcaatgcgccagacgccagggccgttacccggatcgtagaccgacgccaggggcaccgccagcacctggcctggcgcctggtcgttgccgatgcgcagggtcacggtagaccccagcggggcattcgccagcgcgccgttcagtacatagcgcgcttcaaaggtgcgggtggtggcgtcagccgcgtccgaaagcaggcgcagggtcgccgtgaccggctgagattcgctgccatagcgtgtcgccagcgcctcgctgccgaccgccgggcgcagcgtctccggcagttgcacccgcgcttcgcgctgccccgcccgcgccaggcggatcaccacctgcccggcgctgaccacctgccccggctcagcgagggtttccaccaccacgccgtcagcatccgccagcagtccggcatagccggtggcgttttgcgccacattggcctgcgcctgggccgcgctgaggtcggctctcgccgcctctgctgccgcgttaatctggtcgaattccgcggccgagatggcgccgctcgccaccaggccgcgatagcgggccagatcgttggccgcctttttggctcgcgcccgcgcggcatctacggcccgctgttgggactgcgcctgcaaggctagatcagccggatccaggcgcagcagcagctgaccgcgcttgacgctctgcccggtttccacccgccgttcaagcacttttcccgccaccctgaagccgaggtcgctttgggttcgggccactaccacgccggtaaaggcccgcgagccggcctccgcgcgctcgacggtcgccacccggaccagcggcggccggatgcgggggtcgtcatgatcggcaggttcgccgcagcccgcgagggccagcggcaggaggcagacggcaagatggacggcgttgagcctgagcatgggtcaccttaatgaaaagaccggatggtgaccgcattctcagaccagtgaccaataaagtcaatagtcaccaatcagggggagagacttctcaggatcagggaggcaagcagcaccgccgcggtgggcgcggtgtcgagattgtattgcaactgcaccgggttgatgaaaggacacatcaccatatacaccgccagggtcgcttcatccagcggggttttgcgctcgaactcacccgcctggcggccttcgacaaggatttgaccaatcagctgctgcagatgaccggcatactgttccgttgaaggccatttatcgcgcgccgcgacggcggcgatgtcgtacagtttgcgatcctcgaaaaacagttcactgccggcctcggtcagcgcccggaacaggcggcgcagtttctcgctggcggacggcgcatcggcgatggcctcgctgacggccaccatgatcttctccagccggctggcgcaaatcgcctcgccaatcgcctgcttggagtcaaagaatttatagatataggctttggaaaagcctatcgctttggcgagatcggtgaccgtcgttttctcatagccatagcgactaaagtgcgccatggccgcgtcaagaatctggtcccgaacgctgtggtcatggggaccacggcttgcaggggtgggggtatttttcgtcatccgtttagcttaatgcgatcgctatcgtttgacaacgagtgacgttattatgatttggtcacaataacgccccgctctgtgatcctcttgccgcgttacgcctcacccgcctcttggtttatcgcgccggcgggcagacaacccaggccttgcagcgtctgataaaccgcgctgtcgagcggggtatgcggttccgcgcctaaaaaatcaaccagtttatcgttgcgcaggcgtaccggcagacgccagagatagtgcatctcgaccatttcgcgcagggtggcgttgaagggcgccgccatcttcaccagccaccagggaaaggacttcactaccgccctgccgccatagcgggcgaccacccgctggatcgcctgactcatttcgctgccgtccgggtcccagtggccctgcatatgaaagcgggcgaacggctcaagctcgcgcctgcgggcgagcagcgcggcgatggtggcggccacgtcgggcagccaggcccactgatgccccacgccgatcgcccccgggtagctaatgatgcggggaagctgaccaggcttgaccagcccctgagaaaaccagttatttccggcgcgcgggccaaaaaaatcgcccgcccgaacaatcaacgcccggccgccgcgctgcacgtaatccttcagcgccagctccatcgccacccggatggcgcctttgcgggtcaccggctgttgtgcggcctcttcagcaatcagcggaaaggcatccggtccatagttgtagaccgtgccgggcaggactacaagcgcccgctgccgttcggcagcctgcagggtgttgcgcagcataggcagtacctgttgccgccagtgccggtagcccggcggattcaccgcatggacgatgacgtcgcaaccggcagccgccgccgcgacctggccgccatccagcgcgtcgccggctatccactgtatgccatcttcgggatcacgcatctgggcgccgcgcttcagcgcccgaacctgccagttgtctgccaccagccggcgcgccacttccccgccgatgcccccgcttgctcccagaataagtaccttgccgctgctgttcatcctctttccccgttcgctaatggatgcttgacagcctacctgcggctcatatcaaatgaaattgcataccatcgtcgaacggctatacatatttgtatgaatacctctattccctgggagtggtaccgaacctttctcgccgtcctgcaggaaggctctttatcgggcgcatcgcgcaccctgaacatcactcagccgacggcggggcgccatattgccgggctggaaaccgccctcggccaggccttatttacccgctcgcaaaccggcctgctggcgaccgacgcggcgctggcgctgcgggtgcatgccgaggcgatggacaacaccgcccgggcgctggaacgcacggcggccaactttagtcgcgacagagccgatctgcgtggcgtggtgcgggtggccgccagcgaggtggtcggcgccgaggtgctgccgccgctggttgcccggctcaggcaggcgtgcccgaatatcgtcatcgaactgatgctctccaatcgatttcaggatctgcttcaccgggaggcggatatcgcggtgcggatggtcgccccgcagcaggagcagcttatcgcccgccgtctcggcaggattgagcttgggttacatgccaccgccgcctacctgacgcgccagggcctgcccacgaccctcgacgatctggccagccacgcgctgattggtttcgatagcgccaccccacttgttcgccgggcgctgcaggcttaccctcgttttcagcgtgaggccttcgcgatgcggaccgatagcgacctcgcccagttgagcctgattcgcgccggagcggggatcggcatctgccaggtgccccttgcggatggcattattcccctgcagcgagtgctggcggccgacttttctctgtatcttgatacctggctggtaatgcatgaggatctgcgtcacagccctgcctgtaagcgggtatttgattttctcgcccaggggttgcaggcgtatattcgtggcccactggcgagctgacccgccccatcgcgcgggcatttcattgcctgcggaaatagtcactcattgacactgtaaatatggcattgtataaaaccccgccccaataatgagtttcatttgcattactcccatttgctggtcatccactcgcctgtttacaaggatagcgtttaatgaagaaggtcctttgcgcgttaggcttgatgttcaccgccgtcagttccgcgctggcaacaacctaccccctgacgattgaaaactgcggctatcaggagaccttcacccggccgccggagcgcgtggtcgcgctggggcaaaatacggtcgaaattctgctgctgctcgggctgcaaaagcaggtggtcgccagcgccttctggccgaccagcgttttaccgcagctggctgagcaaaacgcgaagattaaaaccttgacggtggaaattccgagcctggaatcggtgctggcgcaaaatcctgatttcgttcccgcccagttgccgctgctgctggggccggaaagcaaagtcgccaggcgtgaagatctcgccaccgtcggcgtgaacagctacgtttcaccggggatgtgcgccactaaaaaggccaccggcgatatgtacggcagccggcaaaagctgtgggatatgacctggctgtatcaggagattagcgatttcgcccgcattttcaacgtcgaagatcgtggtcaggcgctaattgccgatttcaaaaaacgtgaagccgacctgcgccaggagtttggtaaaagcaaaaaggatctctccttcgtcttctggttctccagcgcctcgccttcggccgatgcctatgtcggcggtaaaaacagcgcctccggctttatcgccagcgtgctgggcggtcataatgcgataacctccgagaccgagtggcccacggtgagctgggagagcattattgccgccaacccggatgtgatcgtggtcgccagcctggatcgtaaccgctgggcgctggataaggccgaggagaagatcaaattcctcaaaagcgatcccgccgtcagccagctggaggcggtgaaaaaaggccatatcgtggtcatggacggtcaggcgatgaatccgaccattcgcacgctttacggcgcggaacaggtgggcgagcagctgagaaaaatggggctgaactgatgagcgtcgccgcgattgagacgcgccgcagcatactgctcaccggctggtgtgtactggcagcgatcgtgctggcgctggtgatagcggtgggcgtcagcgtcggcgagctggccatcccgctgcagaatgtcttttacgctatcagcaacagaaccggcttaaccgctgagccgctcaaccgtatctatgagagcgtaatctgggatttccgcctcagccgcgcgctggtcgccgcctgctgcggcgccggcctcgctatctgcggcgtcgtgctgcaaagcttgctgaagaatgccctcgccgaaccctacgtcctcggcgtctccgccggggcctccaccggcgcggtgtcgatcgtggtgctgggccttggcgccggtgcgatttccctctcggccggggcctttgccggggccttcgccgccttcgcctttgtcgccttgctgactaacggtgcgcgcggcggtaatgagcgaaccattctggcgggcgtcgccgcctcgcagttatttaacgccatcacggcctataccatcagcacctccgccagcgcgcagcaggcgcgcgatgtgatgttctggctgctgggcagcttcagcggcgttcgctggcccgaattccagttggtcatcgtggtggtgctcgcgggtctggcggtctgcctgtggtatgcccgggcgctggacgcgttcaccttcggcgacgatgccgccgcctcgctggggattgctgtgccgcgcgtgcgcctgatcctcttcaccactgcggcgctgatcaccgccaccatcgtcagcatggccggctcaatcggctttgttggcctggtggtgccccacgtgatgcgtttcttctttggcccgctgcaccgaacgttgctgatcgccagcgcgctggcaggggcgatattgatggtactggcggacattgcgtcgcgcctgctgattgccccgcaaagtctgcccgttggggtagtaaccgccctggttggggtgcctttctttgccgtgattatctaccgctcaaggaataagtgatgagtatttgcgctgaaaatatcacctggaaggcaggcaaaaaggtcatcgtcaataatgtctcgctgcgggtgccgcgaggcgaaacggtcggactgctggggcccaacggctgcggcaaatcctcgctgctgcgcgttctggcgggactgcgccgcccggatgcaggtcgcgtcaccctcgacggccaggatatcgcccggatgtcgaaaaagcagctcgcccgccgcgtggctttcgtcgagcaacacggcatgaccgaggccaatatgcgggtgcgcgacgtcgtgcgcctgggacgcattccccaccactctccgttctcaaactggagcgctcaggatgacgaggcgattgccgccgcgctgcagcgggtagcgatgctggagaaaagcgaacagggatggttaagcctctccggcggcgagcggcagcgggtgcatatcgcccgcgcgctggcgcagagtccgagcgaaatcctgctggatgagccgaccaaccatctggatatacaccatcagatgcagttaatgcagttgatcagcgagctgccggtaaccagcattgtggccattcacgatcttaaccatgccgcgatgttctgcgattcgctgatcgtgatgcagcaggggcagatcctcgccagcgggacgccggaggagattttgtccgaagcgctgctgtgggacgttttccgggtgaaaaccaaaatcgagatctccccttaccacggcaaaaagcacattcatttcatcatttaggttgggcggatatgcctcttttctccctgcgccctgcggcaaccctctggcctccggtgttactgggaagccagttcgtttttaatattggcttttacgcggtcgttcctttcctcgccctcttcctgcgcgacgacatgctgctctcaggcggacttatcggcctgatcctcgggctgcgtaccttctctcagcagggcatgtttatcctcggcgggacgctggccgaccgctatggcgctaaggcgatcattctcgccggctgcgtcgttcgcgtcgccggttttctcctgctggcgtgcggggcgtcgctgtggcccattatcctcggcgcctgcctgaccggcgtcggcggcgccctgttctccccgtcgatagaggccctgctggcgcgggccggtacccacagccaggccaacgggaaacgcagtcgcgccgagtggtttgcgctgtttgcggtatgcggtgaactgggagcggtgatcggcccggtggccggaggcgtgctgagcgggatcggctttcggcatatcgccctcgccggcgcgggaatatttcttctggcgctggcggtgctctttttctgtctgcccgccgacgggcacacgacaacaacgcgcagacgagtcccatggtggacgcctttgcgccagccgcgctttgtcgcgtttattctcgcctacagctcatggctgttgagctacaaccaactgtacctcgccctgccggtggagatccaacgttccggcggccgcgagcaggatctggcgccgctctttatgctggcctcgctgttgattatcaccctccagctccctctcgcccgcttcgcccggcgaatgggcgccgtgcgcatcctgccggtgggctttctgctgctgtcggcttcctttgccagcgtggcgttattcgccgccgccccacccgccgaaggttggctgcggttaatgccggcggctggttttgtcacgctgctcaccctcggccagatgctgttagtgcccgcagccaaggatctgatcccgctgttcgccgaggagtcgacgctgggcgcccactacggagcgctcgccaccgcaggagggtgcgcggtgttagccgggaatttactgctcggtcatttgcttgacctggcgctcattccgtcgccgcaggcggtttatccctggcttttgctggcgctgtttccgctgtgcagcgccgtcgccctgcgggcaatctgtcgcccgctggcggcaacatgacgcagagcgggcgacagcccgctctggaagtgaaccgacgataaagtacaccgcctggggaagataacgggcgcgccccgccttactttgccgccagctcgcgacgaataatctcggcgccggcgctcagggcgtgcagtttgccggtcgcgacatggcgcggcagcggcgccataccgcagttggtggacgggtagagtttgtcggcatcgacgaacgccagcgccttgcgcagggttccagccacctcttccggggtttcgatagcatggctggcgacatcgatcgccccgaccatcacctttttaccgcggatcaactccagcagatccatcggcacgcgcgagttgtggcactcgagagagataatatcaagggacgatttctgcagttgcgggaaagcctcttcatactgtcgccactcggagcccagcgtctttttccagtcggtattggccttgatgccatagccgtagcagatatgcaccgctgtctcacacttcagcccttcggtggctcgttctaaggcggcgatcccccagtcgttgacctcatcgaagaagacgttaaaggccggctcatcgaactgaataatatcaacccccgcagcctctaactctttcgcttcctgattgaggattttagcaaattcccaggccagcttttcccggcttttatagtggttgtcatacagcgtgtcgatcatggtcatcgggcccggaagcgcccatttgatcggctgactggtgagctgccgtagatagcgagcgtcctccacgaagaccggtttctggcgctccacggcgcccaccaccgttggaacactggcctcatagcggttacgaattttcacgatctcgcgtttggcaaaatccaccccgctgaggtgctcgatgaaggtggtgacaaagtgctgccgcgtttgctcgccgtcgctgacaatatcgatcccggcccgcagctggtcgtcgagggataaccgcaaggcgtcgcgcttgccggccagtaattcttcgctggacagtttccagggcgaccacagagtctctggctgcgccagccaggaaggtttcggtaaactgccggcggtcgatgtcggaagccatgttttcatagtcattagccttttatatgggtttagcaaagcgcgaaattagcagaccattgctcaagcaacgtcttgtgcgggttgataaaatgttgttgtgtaaatttcccctgctcaatcgccaacaggctgcgctcttcccggtcatagacgatttttgttaatgaatgatccaggtggctgagattgggctgatagtattgccccgccggggagttggcattgtagatctccgggcgatatattttctgaaacgtctccatcgtgctgatggtggcgatcagttccaggctggtgtaatcgctgagcagatcgccggtaaaataaaaggccaacggcgcgacgctgttttttggcataaaatagcgtacctgcagacccattttgctgaaatagcgctcggtcagcgagacgccttcctgagcatattcaatgccgaggaccggatgttcgttaccggtgcgatggtaaacatctttactggagacgctcaggcaaatcaccggcgccttgctgaagttggcgcgccaggcgctggattgcacaaaatccttaaagatattgccgtgcagctcgccaaagttttccggtacgctgaagcgactctggtccttattatgttccagaagcagtacgctaaaatcgtaatcccgcacataggaggagaagttattgccgacgataccggcatgacgctccccgctctttttatcgacaatatgcgtttgcaggatctcaatcaccgggaagctggcgctatcctgagcaatattcatctcgacagaaataatatccagttccaccgcatagcgatcgttatggggattatcccagtgggccaggctattaaaacggttattcatcatgattaacgtattgcgcagattttcctcacggttcacccctctggctaaattagcgaagttggtggtaatacgcgtattttccgcagggttatagttttcatcaaaccgggtgcgcttaatcgtataggtaaatttattattcatggcgattgtccatcctgatggcgggcataaagcgaacccggcggaatactctccaccagcctggcgacgcggagtcaggccgggcgcgcttcaaccggtaaatgttgttgattcgttaatgaacctatttttgccagagtcagcgctggagggaaagcgacttaaattcaatgcaacatgagccatcctcatgttgctccaggcggtggccgatggccgacgcaggccgacaatattagtcaataaacgtttgttcaatggatgtaggcagggtacactctttaaccactataagatgggcttttacctgcccgccgtacccgtttagctggagcttttgtcgtacagaatgattgttgatatcagtattatgtcgatgtgcatggccgtactgctgattatgagcgtactgctgaattaagaggctcccgaacgcaatgacactcgctctcatctgacctccacattcgcgaggaaaaaagaagattcagaggattcgcgccgcctgggattgttccgcctgccggcaccctctactcttttgggacttgcttattgaggaatcccggatgaaaaaagctctgcttgccctgttcgctatcgccaccgttaccgccgccagcgcctttgcggctgataaaaccgacgtcccggcgcctgtcgtcgataacggagtccgcccgccgatggagagggatcgtggccccctgccgccgttcccgccgcagcttccgccgcacagaccggtgctgttttcagccacggtagcaaccgatacgccagcggaaaccattaacaaactgaccgcgctgatccccgccggccaggcgaaacactacgaagtgcacgttgaggtggtgccggttggcgagggaaccgacagacaatagcccaggggagatctacgctgtcatctgtcagcaataaaaaagctgccgcatatcgcggcagcttttatgtacttatttacagctgagcagctgaaaattagctacgcactttccggtagataaacagtaccaccagcgcaccgataaccgctaccacgaagctgccgaaattaaacccatcgaccttgccaaaaccaaacagggtactgatccagccgccgaccacggcgccgatgatccccaaaataacggtcacgataaatccgccgccatcttttcccggcataatccacttggctaaaataccggcaataagtccaaaaatgatccaggaaagaatacccatggttaaccgtcctcttgttacctttaagcatttagtattgaaaagagtagcataaataacgagagtggatcggtaataatataaatattagataattccctgccgacgcccggctgatcttgtgacaacctctctggctctggcaggccggctctcgcttattaccttaaaaaaagggaggctattcgcctcccgccatgcggcttatattaccgcggtggttagtcgtgatgaacaacataaccgcgactgttcgtcgaagatttcaatttgccagacctgatggcgcgtcccgacgtgcagcgctttgcagacgccgcgcacccggcccccgcgcgccgaacggatgtggttggcgttaacctccagccccaccaccttttgttcgccttcgctgcacagatagcctgccaccgaccccagggtctccgccagcaccaccgacgctccgccgtgcagcaggccaaacggctgctgtgtgcggctatcgaccggcatagtggcctccagcgtatcgtcggtaacggtctcaaagcgaatatcgagcagccctaccatgttcccctcaccgagccggttgagctgctccagcgtggcctgacgtttccaaatcatccgattatctccagtaacgcctgcagcgggtggcgaacgccgctgccttcaatacgcttcacctgactgcggcaggagtagcccgtcaccagacagcggtttcgcggcagccgctgcatcgcctgctgccaggagagcgcgtaaatggccaacgagttggcgtggtttttcacttcatgaccataggtgccagccatcccgcaacacccaacgctgacgttttccagcttcgcgccgaagtgggcaaaaatatctgcccactgctttgtcgccgccggtagcgcggtcacttcggtacagtgaccgaacaggtaccagggctcaccgcccagatcgggacgggcgtcgctggttagggccttcggcaaccactcatggactaacagcacctggaaatcgccgcgcttgtcgccgagcgtctgcttgtactcatcgcggtagcagagcaccagcgccggatcgacgcccaccagcggcatgcccagctgcgccacgcggttgaggaagtccgccgtcttctgcgcggtgcgcgcgaagcgggtgaggaagcctttgatatgctgcgccttgccgttcggcgagaacggcaggagcaccggctgatagcctaaggcctcgaccagacggataaagtcggccaccacctgggcgtcgtagtagctggtgaagggatcctgcaccaccagcaccatcttcgctttctgctcggcgctcagcgcttcgagctgctcaagggtcatattggcggagcggtggccggccatctgctgcttcagcgacggcgccgagagcagcggcagatcgaccatcccgatatgcttctccgacagctttttcagccaaggctggttaataaaaaagttaaaggtcttcggcgcctgcgccatcagcggcgcataagattcgaccgaggccaccagatgatcgcgcaccggccgcagatagcggctgtggtacagctgcaggaagcgcgagcggaactcgggaacatcgattttgatcgggcactgggtcgaacaggctttacaggccagacagccggacatcgcctctttgacctcatgcgagaagtcatattcgcctttgcgcgcatgccagctgttgcgcgtgcgcgcgaccagcgagcgcaggctgacgccctgctccggcagcgccttctccagctggttgggatcgacgccgcggtcggccagcaggcgcagccattcccgcaccagcgtcgcccgccctttcggcgagtggatgcgctggttgctgactttcatcgacggacacatcgggctcttgacgtcaaagttgaagcacagcccgttgccattacactccatcgccccacgccagctgctgcgcaccgcgatggggatctgccgatcccaggtgccgcgcttcgccgcatcgactttcatcatcggcgcgtcgataccttccggaggacagattttacccggattcaggcggttatcgggatcgaagaccgctttgatcttgcgcagctcggcatacaacgtctcgccaaagaaggccgggctgtactccgcgcggaaccctttgccatgttcgccccacagcaggccgccatacttcgccgtcagcgccaccacatcgtcggagatctgcttcatcagcacctcctgctgcggatcgcacatgtccagcgccgggcgcacgtgcagcaccccggcatcaacgtggccaaacatgccatagctcaggccgtggctgtcgagcagcgcgcggaactcgacgatgtaatccgccagatgttcgggcggtacgcaggtgtcctcggcgaaaggaataggcttggcggcgcctttggcattgcccaacaggccgacggccttcttgcgcatggcatagatgcgctccacgccttcaagatcgtgacagacctgccagccaatgacgcccgcctcgctggcggccatcagctcgtccagccgctggcacagggtagtaacctgctggtcaatcagcgccgcgtcatcgccggcgaattcgacgatattgagcccgagcatctctttatccggtacgtcggtgatcagttcgcttaccgagtgccagacgatatcctcgcgcgccagattgagaactttagaatcgacggtctccaccgacagggctttcgcttcgaccataaagggcgcattgcgcagcgcagagtcgaaggagtcatatttgacgttgaccagacggcgcaccttcggcaggcgggtgatatccagccgcgcttcggtaataaacgccagcgtcccttccgaaccggttaaaatacgggtcagatcgaactcgctcatctcatcgttaaagacgtgacgcagatcgtatccggtgaggaagcggttgagtttgggaaacttatcaatgatcaggtcacgctgcgccttgcagcgctggtagaccgtgttgtagatccggccaaccgtcgagggggtattgcccagcgtctccgccagcgccaccggcaccgcctgggtatcgaggatatccccgcccatcagcaccgcccgcaggccgagcacgtgatccgacgttttgccgtacaccagcgatccctggccggacgcgtcggtgttaatcatcccccccagcgtggcgcggttgctggtggatagctcaggcgcaaaaaagtaaccatagggtttaagaaactggttcagctgatctttgatgaccccggcttcaacgcgcacccagccctcgtcagggttaatctcgatgatgcgattcatatagcgggacatatcaacgataatcccgccgttcagcgcctggccgttagtgccggtgccgccgccacgcggggtgaaaatcagcgatttaaaacgcggttcggcggcgacgcgcgccagcagcgccacgtccgccgtggatcgtggaaaaatgaccgcatccggcagcagctgatagacgctgttgtcggtggccatcgttagcctgtcggcatagctggtggcggtatcgccggtaaaaccctgttgctccagtacctgcaaaaaattcagcaccagttgaactacccctggcgcctgagaaatttgtgggatcatcacgcttgaccctgcctgactatgttgtgtttgaaaatattgtgttggtgctaactaaacgtttgcgtagcgcattcaactttttatcacatttttttcatatgcgcccacgtgttttctgtgcaaaatcagcccggcaaaattattgatattattatcagtatatggatttacgcggcgccagctgtttggcgcgactggaaaggtaaaatttctctatgattaatccccatcagcctcgggacattccgcaaatactgctgtcggtgctgttcctggccctgattatcatatcctgcctgtgggttgtgcagccgtttattctgtccttcgcctgggccggtacggtggtgatcgccacctggccggtgctgctgcgtctgcagcgtgtgctgttcggcaaacgactgctggcggtgctggcgatgaccctgttgctgtttctgctattcgttattcctatcgctctgctggtcaacagcctggtggataacagcgttccgctgatcaaactcatcagcagcggaaatgtgacgctgccggatttcgcctggctcaacagcgtaccgctggtcggcgataaactgtactccgcctggcacggtctgctggatatgggcggctcggcgattatggccaaggttcgtccctatattggcaccaccaccagctggtttgtcggtcaggcggcgcacatcggcaagctgctggtctactgcggtttgatgctgctgttcagcgcgctgctctactggcgcggcgagcaggtggcctatggtttccgctacttcgccacgcgcctcgcggccaaacgcggcgacgccgcggtgctgctggccggccaggccgtgcgcgccgtggcgctgggcgtggtggtcactgccctcactcaggcggtactgggcgggattggccttgccgtctccggcgtgccctacgccgctctgctgaccgtggtgatgatctttacctgtctggttcagctcggccctttactggttttggtgccgtcgattatctggctttactggagcggggacaccacctggggcaccgtgctgctggtctggagctgcgtagtcggcaccatggacaacgttattcgtccggtgctcatccgcatgggcgccgacctgccaatgatccttatcctcaccggcgtcattggcggcctgatcgccttcggcatgatcggcctgtttatcggtccggtgctgctcgccgtctcctggcgactgtatgacgcctgggtgcatgaggtgccgccgccgccgaaagaccctgacgtcgtccttgaagagctcagtgagctggaggccggtcgcaagtaatgcctggcaggcggggagacccgcctgtttctttgcccgcatattgttaagcaaaatttattgatcgccggcaatgcgctggccccgcgcgcccttcacctcgctttcctcccccggtccttcacaacaatttaactattgagaggaatctgatcgacggcaaaggccccgctgcctactattagctcacggttataaatcaacaccttgatttataagcatggaaatcccctgagtgaaacaacgaattgctgtgtgtagtctttgcccatctcccacgatgggcttttttttgccctgcgcatcacgacaccagatagcctgacaccggtaaaaaaaatccccggcatcgctgccggggatcggtcctgtcagggcgaacttattttttcagttccgccagacctaaccaggtttgtaccacggtatccgggttcagggacaagctatcaatcccctcttccatcagccaggcggcgaaatcctcatggtcagacggcccctggccgcagatgccgacgtatttaccctgtttcttcgccgcgcggatggccatcgacagcagggctttcaccgcgtcattgcgttcatcaaacagctcagaaaccacaccggaatcgcggtccagaccgagcgccagttgggtcatgtcgttcgaaccgatggagaagccgtcgaagtactcgaggaactgctccgccagcaaggcgttcgacgggatctcgcacatcataatgatcttcagcccgttctcgccgcgcttcagcccctgacgctccagctcttcgaccaccgctttcgcctgggcgacggtacggacgaacgggaccatcacttcaacgttggtcagtcccatgtcgttacgcacgcgcttcatcgcttcgcattcaagggcgaaacagtcgcggaagctttcggaaacgtagcgtccggcgccgcggaagccgagcatcgggttctcttcttccggctcatagcgctcgccgcccaccaggttggcgtattcgttcgatttgaagtccgacagacgcacgatcacccgtttcggatagaaagcggcgccgagggtggcgatcccttcggtcaggcggccaacgtagaactctctcggcgaatcgtagcctttcatcagctcgcggatttcgttctgcaggcccggctcctggtcgtcaaactccagcagcgcgcgcggatgaacgccaatcatacggttgatgataaattccagccgcgccagaccgacgccttcgttcggcaggcaggcgaagtcgaacgcgcgatccgggttgccgacgttcatcatcaccttcagcggcagatccggcatgtcgccgacgctggagctcttgacgctgaagtcgagcagctcggcgtagacatagccggtgtcgccttcggcgcaggagacggtgacattctgattttcctgaatgcgatcggtagcatcgccgcagccgaccaccgccgggatccccagctcacgggcgataatcgccgcgtgacaggtacgcccgccgcggttggtgacaatcgccgaggcttttttcatgatcggttcccagtccgggtcggtcatgtcggtaaccagtacgtcgcctggctcaatgcgattcatctcgctgatatcgtggatcaccttgaccggaccggcgccaatgcggtggccgatggcgcgcccttcggcgatgatctgcccctgagcgtggagggtataacgctccatcacctggccgcgggaacgcacggtttcaggacgcgcctggacgataaatagcttaccagtgtggccatctttcgcccactcgatatccatcggacggccgtagtgcttctcgatctgcaccgcctgcttcgccagctcctgcacctcctcgttgcttaacgagaaaatatcgcgctgcgcctgcggcacatcttcgatacgcacctgtttaccgtgctcctgggtcggcgcgtaaaccatacggatctttttcgaccccatggtgcggcgcacgatcgccggacggccagcggccagcgtcggtttgtggacgtagaattcgtccgggttcaccgcgccctgcaccaccatctcgcccaaaccccacgccgaggtgataaacaccacctggtcaaagccggattcggtatcgatggagaacatgacgccggaggaggccagatcggagcggaccatcctctgcaccccggcggagagcgccacgccgcggtgatcgtaaccctgatgcacgcgataggagattgcgcgatcgttaaacagcgaagcaaacacgtgcttcacggcaacgagcacggcgtcaaagccctgcacgttgaggaatgtctcttgctgtccggcgaaggaggcgtccggcatatcttccgcggtggcggaagagcgcacggcgaatgaggcctcggcgtcatcggcggacagcaggtcataagcatcgcgaatcgcgttttccagttcgctctggaagggggtatcgatgatccactgtcggatctgcgcgcccgctttcgctaatgcggaaacgtcgtcaatgtcggtttcatccagcagcgcatagatgcgctggttaacaccgctttggtccaggaactgattgaaagcatcagcggtggtggcaaacccgttaggtacggaaacacccataccggacagattcgtaatcatttcaccaagggaggcatttttgcccccaactctgtctacatcattcatgccgagttggttataccaaagcaccagcggtgacgagccattgttggacatcgagacaatccttttgtgatttaataccagtgaaaaaaatttcacgatcgactgcaggattatcctgacatatttatgaagctgaaaaaaacggtgaatcgttcaagcaaattattttttcatttttcggactgttcccccgatattgctaacttgatgatttttaggaattctgatgaaaaacgctggaaataacggcgacaaaaagaaaatgaactacccttttcataaaaaacaaaaatagcgtttcaattttaacaagagacaaatcaaacagggatatgcttaaatttaatatccgctttcaggcaattaaactcattataccggatggtcaaaatggaaagtgctgtagatcgccacgtattttatatttctgacggtaccgccatcacggcggaggtgctggggcatgccgtgatgtcgcaattcccggtcgccatcagcagcgtaaccctgccgtttgtggaaaacatcagccgcgcgcgggcggtaaaggagcagatcgacgccatctatcagcaaacgggtattcgcccgctggtgttctactccatcgtcatcccggaaatacgcgacattattctgcaaagtgaaggcttttgtcaggatatcgtgcaggcgctggtggccccgctgcagcaggagctcaacctcgacccgacgccggtggcccaccgtacccacggcctcaaccccggcaacctgattaaatacgatgcgcgtatcgccgctatcgattatacccttgcccatgacgatggcatctcgctgcgcaaccttgaccaggcgcaggtgatcctcctcggcgtctcgcgctgcggcaaaacacccaccagtctgtatctcgccatgcagtacggtattcgcgccgccaactatccgtttatcgccgacgatatggacaatctggttctgccggcctcgctgaaacccctgcagcataagatgttcggcctgaccatcaatccggagcgtctggcggcgatccgcgaggagcgccgggagaacagccgctacgcctccctgcgccagtgtcggatggaagtgaccgaagtggaggccctgtatcgcaagaataaaatcccctgcctgaacagcaccaactattccgttgaggaaatagcgacaaaaatcatggacatcatggggctgaatcgcagaatgtactaatacactagtacattattaaaaatttgtttatgctatcacccgtggcctatacaggatcatgccctgctcttgcaataagcagggattggtttatcgtgatgcgcatcacttcccggcattttcgccgcggaagaaacagatttttgagaccccaatgaataaaacagacgaattgcgtaccgcgcgcattgagagcctggtaacgcccgcggagctggcccagcgccatcccgtgacggccgacgtggctgcccacgtctcggcctcccgccgccgaattgaaaaaatcctcaacggcgaagaccgccgactgctggtgattatcggcccctgctccattcacgacaccgacgcggcgctggagtatgcccgccgcctgcagggcatgcgcgagcgctaccagccgcagctggagatcgtgatgcgcacctattttgaaaaaccgcgcaccgtggtgggctggaaaggcttaatctccgatcccgacctcaacggcagctaccgggtcaaccacggaattgagctggcgcggcgcctgctgctgcaggttaatgagctgggggtaccgacggccaccgagtttctcgatatggtgaccggtcagtttatcgccgatctcatcagctggggagccatcggggcgcgcaccacagaaagccagatccaccgtgaaatggcctcagcgctctcctgcccggttggatttaaaaacggcaccgacggcaatacgcgcatcgcggtggacgccatccgcgcctcccgcgccagccatatgttcctctctccggacaagcagggtcagatgacgatttaccagaccagcggcaatccgtatgggcatattattatgcgcggcggcaaacggccaaactatcacgccgaggatatcgccgccgccggcgaggcgctgcgtgaatacgatctgccggaacagctggtcgttgatttcagccatggcaactgccagaagcagcaccgccgtcagctggaggtgtgcgccgatatctgtcagcaaattcgcgcgggctccaccgccatcgccgggattatggccgaaagcttcctgcaggaaggcactcagaaagtggtccccggccagccgttgacctggggccagtcgatcaccgacccctgcctgagctgggaagacagcgaaagattattgagcgagctggctgcggccaccgccacccgcctgtaaccgctccgcccgccgcgcctgcggcgggcaattctcttcgctgactcccctaccaaatccggtaacacgataaataacgcttgccgtcaaaaacaacattattgataatgattatcattgttgccttgatttttattctgagagctatgacgcgtatggataacactgccacagctgaaaaaccaaaagacaatgccccttatcccgtggcgacggacagagagatcagcagtcgggttctgttaggcagcgaaggacgagtagtgattgagcatggcggccagcgctatctgctgcgccagacccacgccgggaagttaattctgaccaagtaagcgccccgctgaacgcggggcgaggcaagttagctcgagcagctgacttccagacgtttcccccagtccggcgggcggcggacgtagtcgtcctcgcgatcggtaaaggggtctgccagcgcggcatgcaagcgctccagctcgcccatatcgcccgcctcagcctgctcgatcgcccgctgcgccagccagttacgtaacaccagcgccggattcacgccctgcatcctctgctggcgctgcgcgtcgtccacctgttcatcacgcagccgcgcacgatacccggcaaaccagctgtcaaaggccgcgcggtcgataaactcatcgcgcagcggcgaagcggcgctgagctgttcgctgtggctcagcaggcggaacgtccgggtatagtcgctcttctcgcggatcatcagggcaaacagcccgtccagcaggtcgttatcccctttctgctggctgaacaggccgagtttatcgcgcatccgctggccataagcggtcagcaaggcgtgctgatactcatccagcgccgcgtttaacgcttcagcgctgataaacggcgacagcgattgggcgagacgctgcagattccacagccccaccgccggctggttttcaaaactgtagcgcccctgataatcggagtggttgcagatgaagtccggttgaaaatcgtcaaggaagccatacgggccgtagtcgatggtcagaccgagaatcgacatgttgtcggtattcatcaccccatgggcaaagcccacggtttgccagctggcgatagtctgcgcggtacgcatgacaatgtcacggaaccataacaggtacttatccgcctcatcctgcagctgcggccagtggtggcgaataacatagtcggccagttgctggaccttctgcggctcacggcgatagtaaaaatgttcgaaatggccgaagcggacatggctctcggccacccgcatcagcatcgcgccgggctccacgcgctcgcggtagaccggggtatcgctggtcaccatcgccagggcgcgcgtcgtcgggatccccagagcatgcatcgcctccgacgccagactttcccggatcgtcgagcgcagcacggcgcggccgtcccccatccgcgaataaggagtcaggccggcgcctttcagatgccagtcgtaacggcggccatccgccagctgctgctcgccgagcaggatcccgcgtccgtcgcccagctggccggcccaggcgccaaactgatggccgctgtatacctgcgccagcggcgacatgcccggaagcagcgcttcgccgccccagacaccggccccgctttcaggcgcaaacagggcgtcgggcacccccagctgttgcgccagcggggcgttgcgccagatgagtcgggcgttatccaacggcgttggtgacagggaagtgtaaaagtccggcagttcatcccgccagtgggtggtaaaagaaagggtcatggttcctcctctctccagtgtagtgcctggaacagcggattaacacgggcggagtgcagggttatcggcataaaaaagggaagcgttcgcttccctcttgcttctgaatgacgtcagattcgccgcgcctgccagaactttttgttccagtagacgttatccagcgaggaacgggtgacgccctggctggtggaggcgtgaataaactggttgtcggtatcgtagatgccaacgtgcaaaccgctctcccctgagccggttttgaagaacaccagatcgccgggcagcagatcgcgcttatcgatgcgggtgccgatctccgcctgctcgcgggtttcacgcggcagctggagggcaaatttatcgcgaaacgtgcgcaccacgaagccggagcagtcaacgccgcgcggcgtcatgccgccgtagcgatacggcgcgccgcgccagctgcgcagctgctcgttcagattcgccaccaccgtaatggagtctgccagccgaggattcggcggcggtgcccgatggctgctgcagccggctaaaattaacgccgccgccaacatgaaccagaagcgcatttcagatgatccctctgtccctagtctctatcgcaataatttagcttgtttatcaatatagtgacaagataactgcgtgctactgtgacgcgatgagcataatatgaccggccacctcaacgcgctggaacgggatcgcataggcggcggttaaattttcctcattcagcacctcggcggtctccccgcaggcgatggcttccccctggcagagcagccagctctgaccggcgtggcgcagggtatggttgagatcgtggctgctcatcaccaccgcaatccccgccgcgctcagctcgtgtaacagccgatccagcgccgcctgctgggccacatccagactgttcatcggctcatccagcagcagcagctgacccgcggaattactcaagggatcgatctgcaggagcactgccgccagccgcacgcgctgccactcgccgcccgacagctgattgaccggacggcccagcttattgtccagaccaagcctggccgcgatatcgctcagacgggcgctatcaccctgctgctgcatatgcagcgccaggtagtgccataccggcatggcgaacggcggggtctggtgttgacacagatatccgcgacggcgcgccagctccctcgccggccactcgtcaagcagccggccgttaaaatgaaccgtgccggggccgtcggacagccccgccatgcgggtcagcagcgtgctcttccctgcgccgttcggccccaccagatggacaatctccccggcgcgaaaggccgcagaaaacggggccaggcgccccgccgcttctacatcctgtagctgcatcagaaacgacattattgcgccagcgctcctttaatcgccgccaccagctgcggatcatccggcgtcatatccggcgagaagcgctgaatgacgttgccctggcgatcgatgaggaatttttcgaagttccacagaatgtcgtccacatacagcggcgcccggcctttgctggccatccgctcataaaaaccgctgccttccggggccaccgctttcggcgcggcggcaatcagtttttgatagagcggcgcgcgatgttcaccgttgacgtcaattttgctaaacagcgggaaggtgacgccgtaggtggtgctgcagaaggtcttaatctcctcttcactgcccggctcctggccgaggaactggttgcaggggaaccccagcacgctgaagccctcggcggcaaactgcttttgcagatcctcgagttgctcatactgcggcgtcaggccgcatttcgaggccacattgacgatcagcagcaccttgccggcaaaggatgccagggtggttttctcgccatcaatggtcgtcacttcggtattcagaatgtcatgttgcatagcctgtcctcaatggataaaccggtttccggtgaaggtgatccctttctactgtagcggattcagcgcccgccattctactgccattccccccgagttgtcgcatgatgtaacagcgcttcgctggccgccggcaacatgaaatcctctcaattgggccgtcgaccatttccgtgtacagtgttccatgaatgtaatatggtttcgttacttgttaatttaagagagttttagtgatgaagaagttgtttagcctggcgttaatcgccacctctgtcgccctgctgagcgcctgctccccggatgaagataataaagtaaaagtcgctatcaataccgggccggacgaagccatctggaaagtggtggagcaggtggcgaaggataaataccacctcgacgtcgaagtggtctccttcaatgattatgtgctgcccaacgaagcgctgaacaacaaagatgtcgatgccaacgccttccagaccctgccgtaccttgaggcgcagtcgaaagaacgcggctataaatttgcggtggtcggtaaaacctttgtcttccctatcgccgcctattctcaccggatcaaaaatatcagcgaactgcccgaaggggcgacggtgaccatctctaatgaaaccaccaccctgggccgcagcctgctgctgcttcaggcgcaggggttactcaagctgaaaccgggcgtcggctatttacccaccacgctggatatcatcgacaatccgaaacagctgaaaattgttgaagtggataccccgcagctgacccgtacccttgacgatccgaacgtcagcctgtcaatcattaacaccaacttctccgcccaggcgggcctgtcggccgcccgcgacggtctgtttatggaggggccggattccccatacgtgaatgcgatagtcgcccgcgaggataataaggacagcaagaaaattcaggaattaaaagccgccttccagaccagcgaagtcgcggaaaaagcgaaggaagtctacaaaggcgacgcgatcaaaggctggtaagcctgaaccggcgccgtccctgccgacggcgccgcgctatccccgcccccgcgaacgcagcagcaaccagataaagaccggcgcgcccagggtcgccgtcaccacgccaatcggcagctctgcggcggaaagcgccagccgggcaatgatatccgcccccagcaaggcgcttgccccggccagcatacaggccgggagcaacacccggtgatcgctcaagccgcatagccgcagaatatgcgggatcaccagaccgataaagccaatcgcccccgccagcgccacgctaacgccgaccatccagccggtcgccaccaccagtaatttgcgccacagccacagcggcagcccaagctgacgagcggagacttcgcccagcgccagtaaattcaggggttgcgactgcagacaggcccagcagagcaccggcaggagggctatcatcagccacagctgttgccagtcgacgccgccaaacccgcccatcatccagtacattagctgacgcaggtcaaaagaggtggagaagtagactgcccaggtcatcagggcgctgcagatgatccccagcgccacccccgccagcagcagacggctggtagacagatggcggcgggcaaaacgcagcagaataaaagtgatcagcagcgcgccaaagatggcacacaggccgagcgcccagccgggcaagactcctttgcccagcaggacggcggcaatcagcccgacgcccgcgccgttggagacccccagcagccccggctccgccagaggattttcaaacaacgcctgcataatcgccccggagagcgccagcgccgcccccaccagcagcaccgccagggttcgcggcaggcggatctgccagataaacagctgacctttggcgctgagccactcgccgggcgggatccattgctcccccgcgcacaggctgatcagcagggtgaccagcagcaacagcgttaatccgaagagccaacgccggctgcggcgctgttgaagatgggcgagagtcagcatagattccattacgcagggggaacaagaggctgattttacggtggctgtcgcggtgagaaaaggaaaacctcgcgcccgttcgtcgacgcgaaggaaaatctcctccgcgtctgcggtcgttcgtcacaccagaatctgaaacagcagcgcaaagagaatgatgttcgccaccacgattgcccagccgttatagagcatatatttcagatgagtagactgcgccagccccatctggccgaacatatctgatgagggaaacggcccgaaccagtccacctgggatgaggccagcagcacggcggtggtcccctggggcggcacgccggcggccatcagcatcgggccaaagattttatgagtaaaggtcatctgggccaccgccgcaccgggcacatggccgataatattgaacgcgaagatgctaaagcacagccaggccggggagatcccctccagcagcggttgggtatactccagcagcccctgataggcgtgcaggccatccatcagctcaaggatcgggttgtacagccagtagagaataaacatccacaccagacggccgcagccgtgatacagtgcctgaaggatctgcgtcggtcgcaggccgcctaccaggccggtcatcagggccaccagcagcatcacgattatcgcgaagctgaagccggctttaatcaccacgccaacgatcgccatcacgatgatggtcgccgcgaaggccagcgcgcttaatttacgccgacgctgctgcgcggcgctgagatcctcttgcggcttttccgcgagatcgacgtcatagcgcagtttgccttcggtcatcttctggatccgtcccgccattacccagccggccagcagcgtgaccgcgctcatcggcagaccaacgtacagcagatagtccggatagctcaacccaccgaggctgaggatcgtcacggtactgggggtgaaaggcccggtaaacagcccaacggaaccggcggtcatcatcagcgcggcgaccgttggcggcgtcaagcgtaccgctgccgccaccggaatgattactgccacgataatggcattgccaccggccatagtgcccagcgaaccgcaaattaaaatcgatgacgccacaatgccgaatttcacccgcgtctgactcgacaacccgatgcgatggacgacaaattttaccagctcaaccgctgcgccggtgcgggtggccacttcccccacgccggcgccgagcataatgataagcccaacggtggcaataaatgacccggtggatttcgccagcatcgtgcccatttccggcaggccggtcgaggtcattatcatggcgataataatcgaggagatgaccgccagcacaatatcaacgccgatcagcgataatatcgctagcgccaccagcggcgtaaatcccagcagaccaagctcgctgcctggtcgaccgtggcaccacagcgcgatcaacacgaacagcagcaataacagaccaataataacgtttttccgcgtgatattttgtctgacaggcgcattgcctgtgagcgttgagtcactcataacactccttaatgccaatcaatccgaccatgatggtcaggtggtgtatgggggcctgctcagaaaatatcctccctctttttcattattgattggccgcggcctgagggtttgtttgggtacaaaggaaacgattctgagagcgtaatatgccgccattgggcggggtctacagcacaagatgtaaccaatgcgctgattggtgattaaatctatgttaacttagtgttagtagaaaatgactttttatcggtaggctataaccctgagttaactgttcatgaaactgcgtcatctggaaatcttctatgccgtcatgacctgcggctctttatcgcgggcggcggaagcgctcaatatctcccagcccgcggccagcaaagcgttaaaaagcgccgaaatgaagctgggttttaccctgtttcagcgggtgcgcggcaagctgctgccgaccagcgaggcgatcacacttttcgaaaaagcgcagagcatttatcaggacctggacaacctgcgcctgctggccgacaacctggctcgcgatccgcgcgccaagatcactttaggctgtctgccaagcctggggttaagcctggtgccggagctggtgaccgacttttatcagcaaaacagcaacgtggtgatgacgctcactaccgagcacaccgagacgctggtcaaaaaactggatttgcgcgagatagatttggcgctgacgctacagccggtgcagcagggagagatcctgaccaccctgattgccgaagtaccgctggtgtacatcgaccgtcattatcgtcagggggcggtggagatcgatcagatcgaccagcagcgctggatctcgccgggaccgcactcgctctctgccgccatcgccacccgtcgcgacttttccaccacccggctaaacgtccagacctactatatggccaccgagttcgtgaagcgcggcatgggctgcagcatcactgatatcttctccgcccagcacaacctggccccggagatgatccatcccattacgccgccgatggcgattaacctctgtctgttacgccgggccgacgtttccctgagcccgatggcgcaaaagttcgtcgattttctctgccagcgtctgcgccagcagctcaaggagattaacctgcggttataccctgaccataaaaagtcaattgcgccgctggggtaaatgctttgacataacccgataaatttatcagcggtggatatatcgggttatgaacaaacgcattgtcattatcggcggcggcgtggtcggtctggccacggcctgggaactgatcaagcgcggccatcaggtgcaattactggagcgcaatgccgaaccgggcagcgccaccagttttgccaacggcggacaattaagttaccgctacgtcgccccccttgccgacagcggcgttcccctgcagggaatgaaatggatgggcaaagccgattcgccgctgaatatgcgtctcaggatgtctctccagcagtggcgctggctgctgcagtttctgcgcgcctgtaataaccagaccaataaaatgaatggcgaccatattttacgcctgtcgttgctcagccgtcaggtcatgcaggcgtggcgggatgaggataatcttgccgatttccactggcggcgcagcggaaaattaattatccatcgtcgcgaatatgattttaataaagcagcaaaagggattgatcctcagtatcagcaggcgctgaatgctgaagcctgcctgcagctggagccggcgctcaaacatattagtccttctctgcagggcggaatctattcgccaggcgatgaaacggcagattgtcatcagttctgccttgccctgctcgacaagctcaatgccagcagcgactttagcctgctgacccagtgtgaggtgcggcgactcaataagcgcgggggacgcatcagcagcctggagaccagtcaggggaccctcaccggcgatgagtatgtcgtcgccgccggtaacggcagtggttctctgcttgggcatctgggggttcgcgtgccgctgtgcgccctgaaggggtacagcctgaccctgccctatcctgaaaaagcaggtattgcccctgacatcagcgtcaccgactacgggcacaaaatcgtttatgcccgccttggccaacagctgcgtatcgcggcgatggtggacatcggctacgacggcgacgaactgcgcgaaagccgcattcaggcgctgaaaaacatcgtcgcccgcagctttcctgaactggaggggctggacgaggccgaagtctggaccggcatgcgcccgtcaacgccagctggcccgccgatgctggggcgcgccggataccccaacctgtggatgaacctcggccagggtagcctcggctttactctcgccgccggcagcgcggtggtgctgggcgcgttaatcgacaatcagatgccagacatttctttagaaggtctcacatggaaacaaaccgcatgacaattattcgcaataatccacaacctcgtcttgccgccagcgttgcgtatggcgatctgctgttcctctccgggcagacgccaaaaagcaatgaagacgatatcgttttacaaacccgtgaagtactggagaagatcgacgcgctgctggccgcggccgggagcgataagcagcacattctctccgcgcagatctggttgaaaaatatcgagcgtgactttgccgcattcaatgaggtgtgggtgcaatggatgccggaaggctatagcccggcgcgagcggccgtgcaggcggagatggcgcgaccagaaatcctggtggagatcatgctcaccgccgtcaaagcgtaaagattgacagaaaagaaaaaggccgcaatgcggcctttttaattagttcagattatttgtctttcggcgacgcgttttcgacacggcttttcagcttctgaccgggtctgaaggtcaccacgcgccgggctgtaatgggaatatcctcccccgtcttcgggttacgtcccgggcgttggtttttatcccgcaaatcgaagttgccgaacccggagagtttgacctgttctccgttttccagagcacgacggatctcttcgaaaaacaactcgaccagttctttggcatcccgcttgctaagcccaagcttatcaaacagatattctgacatttcagcttttgtaagcgccataggttcaatccctcaatgatgcctggaatcgctcttttaatgcctctacacatctggcaacggtagcggcaatctcctcttcttcgagtgtacggctggtatcctgcaggatcaggctaatcgcaaggctcttatacccttccgccacacccttaccacggtacacgtcaaataagtttacgccaactacctgatttacgccaactttcttacattcggctaaaacatcggcggcagccacgttttccgcgaccagcaccgcgatgtcgcgacggttcgccgggaagcgggaaatatcgcgcgcctgaggcaccacgcggtctgcgagcttgttccactccagttcgaacaccagagtgcgaccgttcagatccagtttacgttccagctcaggatgaacaaccccaatgaaaccaatgcgttcacctttaagataaatcgctgcggattgtcccggatgcagcgcggtggtcgcttcagcacggaattcgatatccgctaattttccggttaaatccagaacggcttccagatcgcctttcagatcatagaaatcgaccgtctctttcgccagtgtccagtgctcttcgtagcggttgccgcagatcgccccggccagcatcacatcctgacgaatgcccagcggcgcattggtgtccggcacaaagcgcaggccgctctcaaagatgcgcacccggctctgctgacggttctggttgtagaccacggtgcccagcaggccggtccacagcgacaggcgcatcgccgacatttcgctggagatcgggcttggcaggatcagcgcctcttccccggcgtggatcagctgctggactttcgggtcgacgaagctgtaggtgatcacttcctgatagcctttgtcgttcagcagcgttttcacgcgcttcagcgacaggtccgcttcgcggtgggttcccatgatcagacccgcctgcaccggctcgtcaggaatgttgttgtagccgtaaacgcgagccacttcttcaaccagatcttcttcgatctccatgtcgaaacgccagctcggcgcaaccgcctgccattcgccctcgccaaccgtcacttcgcagccgaggcgctgcagaatgtcggtgacctgcgcgtcagcgatatggtggccaatcaggcgatccagcttgctgcgacgcagcgtaatggtggcgcgtgttggtagattctctttgctggtaacgtcaatgaccgggccggcttcaccgccgcagaggtcgatcagcagacgggttgcacgctccagcgctttatactgcagggccggatcgacgccgcgctcatagcggtgagaggcatcggtgtgcaggccatgacggcgcgcgcggccggtaatggacagcgggctgaagaacgcgcattccagcagcacgttctgggtttcgtcgttaacgccggagtgttccccgccgaagatcccccccatcgccagcgctttgttatggtctgcaatgaccagagtgtcgctgtcgagctttgcttcagagccatcgagcaggaccagggtttccccttctttcgccatgcgcaccacgatcccgccttcaatacggtcgcggtcaaaggcgtgcatcggctgacccagctcaagcagcacatagttggtcacgtcaaccaccgcgtcgatggagcggatcccgcagcggcgcagcttctctttcatccacagcggcgtcggcgctttgacgttgatacctttcaccacgcgccccagatagcgcgggcaagcctgcggcgcgtcaacctgaatcggcagcacgtcgtcaatcgtcgcggcaaccggcgtgatttccggcgcgttcagcggcgctttgttcaggacagcgacatcgcgcgccacgccaatgatgcccaggcagtcggcgcggtttggcgtgacgctgatttcgatggtgttatcgtcaagcttgagatattcgcgaatatcggtgccgatgggcgcatctgccggcagctcgatgataccgctatggtcgtcggaaatacccagctcggagaaggagcacagcatcccctcagacggctcgccgcgcagcttcgcggccttgattttgaaatcgcccggcagcacggcgccgatggtggctaccgcgacctttagcccctgacggcagtttggcgcgccgcagacgatgtccagcaggcgttcgccgccgacgttgactttggtgacgcgcagtttatcggcgttcgggtgctgaccgcactccaccacttcaccgacaacgacgccgttgaagctgccggcgaccggctcaacgccatctacttcgaggcccgccatggtgatctgatcggaaagcgcttcgctgtcgatcgccgggttaacccattcgcgtaaccacagttcactgaatttcattgttctgtcctgcccttatttaaactgtttgaggaaacgcagatcgttttcgaagaacgcgcgcagatcggtgacgccatagcgcagcatggtcagacgctccatgcccatgccgaaggcgaagccggagtagacttccggatcgatacccacgttacgcagcacgttcgggtgcaccatcccgcagcccagcacttccagccatttgccgtttttacccatcacgtcaacttccgcagacggttcggtgaacgggaagtaggacggacggaagcggacctgcagatcttcttcaaagaagttgttcaggaagtcgtgcagcgtccctttcaggttggtgaagctgatatttttatcaacgatcagaccttccatctgatggaacatcggggtgtgggtctgatcgtagtcgttacgatagacgcggcccggcgcgataatacggataggcggctgctggttttccatggtgcggatctgcacgccggaggtctgcgtacgcagcaggcgagtggcatcgaaccagaaagtgtcgtggtcagcgcgcgccggatggtgacccggaatattcagcgcatcgaagttgtggtaatcgtcttcgatttccgggcccgtcgccacggtaaagccgagctcaccgaagaaactttcaatacggtcgatggtgcgagtaaccggatgcaggccgccgttttcaatgcggcgacccggcagcgagacgtcaatggtctctgcggccagacgcgcattcagcgctgcgccttccagttcagctttacgcgcgttcagcgcctgctgcacctgctctttcgcctcgttgatgaccgcaccggctgccggacgctcttccggcggcagctcacgcagggtggtcatttgcagggtcagatgcccttttttacccaggtattccacgcggacgttgtccagcgcagcaacatctgatgcctcgttaatggctgccttggcactggcaaccagctctgcgagatgtgacatggttttcctcattatgtcggtgcagacaccggttatagtgaaattaatattccgaatccatatacgaaaaaagcctccacaggggaggctttctggcgctgttttccgtttcttctttcacgcgcaagccccctgagttcaggtgctgaagtaaaaaaagaagcggaaaatagcagcattcatgcttgcattaccttgtctggtaagaaacgtcagagctgtattgaaaagcctgcgccgataaaagtcaatgtattgatggtgttgaaacgaaaagagggagacaagctccctctttcaactggcttatgccagagctgctttcgctttttcgaccagagcggtgaacgctactttgtcgaatacagcgatgtcagccaggatcttacggtcgatttcaacagaggcttttttcaggccattgatgaatttgctgtaagaaataccgttctgacgtgctgctgcgttgatacgtgcaatccacagttgacggaactgacgtttacgttgacgacggtcacggtaagcgtactgaccagctttgataacagcctggaaggcaacgcggtatacgcgagaacgcgcaccgtagtagcctttagcttgtttcaaaattttcttgtgacgtgcacgtgcaattacaccacgttttacgcgagccatgtgtgctctcctgtatctattctaagttaaaaaagttaaacgttaacgacttatgcgtacggcaggcacgcgataaccaggcccagatcgcctttggaaaccatggctttcggacgcaggtgacgtttacgcttggtagcttttttagtcagaatgtgacgcaggttagcgtgcttgtgcttaaaaccacctttaccggtttttttgaagcgcttagcagcaccgcgtacggtcttaatttttggcattttaataacttccacttcgcattgttaataaacgaaacaaaggcgaacaaaaccagtgagccgaagcccaccggaaatgtttcttgatggccttactgtttcttcttaggagcgagcaccatgatcatctggcggccttcgatcttcgttgggaaggattcgactactgccagttcaaccagatcgtctttcacgcggttaagcacttccataccgatctgctggtgggccatctcacgaccgcggaaacgcagcgtgatcttggccttatcgccatcttcgagaaagcgaatcaggctgcggagttttacctgatagtcaccttcatcagtaccagggcggaatttaatttccttaacctggataactttctgcttcttcttctgttccttagaagacttactcttttcataaaggaacttgccgtagtccatgatacgacaaactggcggctcggcgttagggctgatttcaactaaatctactccagcctcttcagccttttcgatagcttctctcagactcacaattcccagctgctcaccttccagacctgttaagcgaacttcctgggcgcgaatctcgccattaatacgattcggacgtgccgtttgaactcgttttccgcctttaataccttattcctccagttgttgaagactgcggctgcgaatctcttgttgcagcttctcgatcacttcatttacgtccatgctgccgaggtctttcccgcgacgggtgcgcacggccactttgccggcttcgacttctttgtcgccacagaccaacatatacgggacacgacgtaaagtgtgctcgcggattttaaagccaatcttctcatttctcaagtctgcttttacacgaatgcccgcattttgtagtttacgcgtcaattcgttaacgtattcagcctgagaatcggtaatattcatgaccactacctgcactggtgcaatccaggttgggaagaagcctgcgaactcttcggtcaggatgccaatgaagcgctccagagaaccgagaatcgcacggtgaatcatgaccggcacctgacgctcgttgttttcgcccacataggaggcgcttaaacgctgcggcagagagaagtccagctgtacggtaccgcactgccatgcacgatcgaggcagtcatacagggtaaattcaattttcgggccgtagaacgccccttcacccagttgatattcaaatgggatgttattttcttccagcgccaccgccagatccgcttccgcgcgatcccaggtctcgtcgctaccgatacgtttttccgggcgagtcgacagtttgacgacgatcttctcgaagccaaaggtgctatacatatcgtagaccatacgaatacaggcgttcacttcatcgcgaacctgatcttcagtacagaagatatgcgcatcatcctgggtaaagccgcgcacgcgcatcagaccatgcagcgcgccagacggttcgttacggtggcagctaccgaattccgccatacgcagcggcaggtcgcggtaggatttcagcccctggttgaagatctgcacgtgacccgggcagttcatcggcttgatacagtattcacggttctcagaagaggtggtgaacatcgcatctttgtagttgtcccagtggccggttttttcccacagcacacggtccatcatgaacggaccttttacttcctgatactggtactctttcagtttagaacgaacaaacgtttccagttcacggaagatggtccagccgtcattgtgccagaacaccatccccggcgcctcttcctgcatgtgatacaggtcgagctgcttaccgattttacggtggtcacgcttggcggcttcttccagacgctgcaggtaggcattcagcgcttttttatctgcccacgcggtgccgtagatacgctgcaacattttattgttgctgtcgccgcgccagtaggctccggcggttttcatcagcttaaagtgatggcagaagcgcatgttcggtacgtgcggaccgcggcacatatcgatatattcttcatgatgatacaggccaggcttgtcatcatgggcaatgttttcatcaagaatagaaactttatagctttcgccgcgtttcacgaaggtttcacgcgcttcatgccagctcactttcttcttgataacgtcgtagtttttctcggcgagctcatgcatacgtttttcgagcgcgtcgatatcttcctgggtcagggtgtggtcgaggtctacgtcatagtagaaaccattatcgacaaccggaccgatagccattttggtgttgggccacagctgtttgatggcatggcctaacaggtgcgcgcaggagtgacgaatgatctccagcccttcttcatctttcgcggtgatgatagagagagtggaatcggattcgatcgggtcacaggcgtctaccagttcaccatttacccgcccggcaatggtggctttcgccaggcctggaccgatatccagcgcgacatccatcggactaactgcgtggtcaaaatggcgttggctgccatcaggaagcgtaattacaggcattttatgtccttatttgcagtggtgccccgcacgaaagagcacatacaaaactatataatcataattatcatcaggttaaggcgcagttcccgcttcactctgcgaaaataggagcacgaccggaacgatcgctcccccctgcagccgcctgctgataacaccggggagtagtttacacatcattggtacgtgattaaagccgcaacagcataaatgatggcggaatgcggagaaaacaagagggccacggataaaaagcagaatataagcgatgtggcgcggtaatattggccaatggcgccggacgatattattcggacatgataaaagagacgtggagatattgcctgctgaatgtataccgcgggccattaaaccggtaccacttaacccggcttattagaccgctcgcgaaacgatagcctgcaatattaagaccactcgccggccaccagcgtatgcacattaaaggcgtcgttcatggattttccggtggtaggggcgccgggcgcaatattcgaaccagcctcaacgtcagaggctttggcgatacctacctgggtatgatcctgatgacccgatggcggaacgggcgtggcggctgatgcgccaaaagaaagcacgcacagcgccagggctgcgatggtataacgattgtttttcatgatgttaattctcttattacggaaaacagaccgggcaatgtcgccctccggtcagtggttgttagtatagatccagatcacatatttgtccgtcgaatatttagctatttgtgtcaaatagaatgaatatttgtcaggcgctcgtgaataatggagaaaaaatggagggctatttcctttttacaaaaagtaaaacgaacggccagaaaaaataatatcactaattgctaaaaccaaaacgaacaggccggggaaaacccggcctgaaatattacatcttatacccgagggagagcgaggtccggcgatcggtatgctccggcgcggacgcaggcggctcagagttccaggtcacgttgtaggcgaccttcagggcgaaatgggcgttaatcgccacgtttaacgcgctctctgagttgaccgtggtgtcctcggcgccgaacaccgataccccttgcgaaaatttggcgttatcggtcatctgccaggcccatgtacccgaagcataacccagcggctgggtatcagtatccccgtcggtatattcgtcatagcgaacgccaggaccgaattcaaaccgcagactgtgcaccggcccgttgaggatctgacgaccatagcccgccgtcacaacatcgcgctgttgatagccgttgtagcggtctgttagccagctaccctgaccaaagacatagttcatatcggtcaggttgtagcggctacgtccgccgacagcatatttttctgaggatcgctcatcattggacgacgtgttgctggcgttgccccacagcgaccaggcggtggtattaccataccaggtcagggtggaatccgccgtcatcgaagagctcttggtgttgccggactgcgccaggtagcctgcgttaaccaccccttcgaacggttttttggcagcggaagggtcatccatgacggtaaatacagaatcatcggccattgcgccaacagacgcaaaaagcccccccgccagcataaccgctgcgggtactgtctttaaaagcttcattataactctctaaaatacatttttttaggacagtacaaatgatgaacaggcataatctcgccggctcattgaatttagcgtccgtacaacataaaagagacctgagggtcccggaaactttcgcgaggatcgcggagtgcaggtcctaagaaaggtagcaaattataaaaaagcacgaataacatagcaatcacttactctttcgttttttgaataagacagctccggaaacaatctttatttcataatgaaaatagaggcatctttgcaaaactgtcaggaactggactttccctccccgagtcatcgtgccatgcttaaattaacgacagtcgccgtattaaggaggagaaggaatgaccaaaatttacacgctcacgctggccccctcgctggatagcgccacgcaaaccccacagatctacccggaaggcaaacttcgctgcagcgcgccggtatttgaacctggcggcggcgggatcaacgtggcccgcgccgtgacctttctcggcggcaaagccaccgccattttcccggtcggtggcgctaccggcgagcatcttgccgccctgctggccgatgagcaggtgccggtcgagaccgtcgaaacccgcgactggacgcggcaaaacctgcacgtccacgtggccgccagcggcgaacagtatcgcttcgttatgcccggcgcggcactgacggacgatgaattccgccgtctggaagagaaggttctgactatcgaacccggctctctgctggtggtcagcggcagcctgccgccaggtattagcgtcgataacctgatgcagctggtgaaaaatgcgcaacagcagggactgcgctgcatcattgacagttccggcgatgcgctggccgccgcgctggacgtcggcaatattgagctggtgaaaccgaaccagaaagagcttagcgccctcgtgcagcgcgatctcagccaacccgatgacgtgcgccttgccgctcagtcgttgatccagtccggtaaagtgcgccgggtggtggtctccctgggtccgcagggggcattaggcgtggacgccagcggcagcgttcaggtagtgccgccaccgatgaaaagccagagcaccgtcggcgctggcgacagcatggtgggcgccatgaccttgcgtctggcggaaaacgccagccttgaagacatggtacgctttggcgtcgccgccggtagcgccgcgaccatcaaccagggcacccgcctctgctcgcgggccaatacgcaaaaaatctatgattatctctgcgggcgttgatcttccctgccccctccgcgccggcggaggggaatcacaatataagcaggatggtctatgctggaaaggccatgcataacaacggggtgtagagatgagtaatgagattaccgcctgggtcgtcagcgtgaccttccatgaacaggcgctgacggagatcaatgaggtcagcaaccattttacccgtgccgggtttgtactgacgctcaatgatgaagagggctcgccccatgagctgggtaccaacaccttcggcctgctgagcggccagacggccgaggaagttaaggccctcagcgccggcctggcggaagcggcccttggccgcccggcggaaatcgctgtggccacattcgccgagtggttaaaagctcaataagtgcgtttagcgcaacggaaagcgtcagttgtgcgtcagttccaggtttacccggtagtaatgcgctaaccttatgatatggtggaaaacatggggagagacagcatgtggcaagcaatcagtactcttttacgcgattggcataccgaagacgctgaaatcgaactgaaaaccgagctgcccggtggagagatccattccgcctggcatttacgcttcggcgggaaagattacttcgtgaaatgcgacgaacgggaacttctgcctatcttcaccgccgagtccgatcagctggagctgctgtcgcgaagcaaaaccgttcgcgtaccgcaggtctttgccgtcggcagcgatcgcgactatagcttcgtggtcatggagtacctccctccccgtccgctggatgcgcacaatgcgtttctgcttggccagcagctagcccacctccatcagtggagcgatcagccgcagttcggtctggattttgataacgatctttccaccacgccgcagcccaacgcctggcagcgtcgctggtcggttttttttgccgagcagcgtatcggctggcagctggagctcgcggcggagaagggattgcactttggcgatatcgataccttagtcgatatggtacagcagcgactggccaaccatcagccgcagcctttgctgttgcacggggatctgtggtccggcaactgcgctttagggccggatggcccctatatattcgatcccgcctgctactggggcgaccgcgagtgcgatttagccatgctgccgatgcatccggaacagcccccgcaaatctatgacggctatcagtccgtttcgcctctgccgtcgggttttctcgatcgtcagccgatttatcagctttatactctgctgaacagagcgattttgtttggcggccagcacctggtaacggcccagcaggcgctggatgatgtattgatggagaaaatgcgttaaacaagcttcacggcggaccttgccggtccgccgcagcgttttatcagttaatctcgacgccgttcaggcggaatttgatggtcatcgttacgccggtacccggtcttccctgctcataacgccatctgcgcatcgcgcttttcacctcgcgttcgaacatattcgccggctgagcagagaggatctgcagattatcaatgcggccatcaggcgaaacgtcaaacttcacccgtaccgtcccttcaatgcgcagcgcctgagcgcgcggcggataggacggctgaacgcggctgatcgcccgcgggccgctcggagcagtaacggtgggtttagccgctgcggtcgaggtacttggcgctgtacgcgccggcgccgtattgttgttttcaaacggcgaggccggacgcggctctgctgccggcttcacttcccgcttcggctgttcaacctttttctccggcttaggcttgggtttaggtttgggcttcggcttaggttccggtttatggatcaccaccggcgcctctttcggcggttcaggcgctacctctggctccggctcaggttcgggttcaacaacgggctccacgacaggctgcgccgccggaggcggctcaagatcggccggcgccaccattgtgatctctatcggctgcgtcggagaaggctgttcaataacctgatgtaccgaggtataaagcagccccgccacaacggcaccgtggatagccacggacagcagcgttggccacggaaagcggcgaggtaaatcaagggtcattgcgctcatagtcgtttctgttgaaaaatgatgctccgattttaaatgcaaatagcaatcatattcaataaggcgtcttaacctgagtcaatttttgccgccatttgcagaaaaaagctgcgtcggcagtgctttccactccagagcgcatctttgcattgcagtccatcgctgtttaacttaacgtaattcgcctgattattgataaggagctttgccgtgctttacgttatctacgctgaagatatcgccgattctctggaaaagcggctgtcggttcgccccgcgcatctcgcgcgtttacaactcttacacgatgaaggccgactgcttaccgccgggccaatgccggccgttgacagtaacgaaccgggcgcagcaggattcagcggctcaacggtgattgccgagtttgaatcgctggaagcggcccaggcctgggctaatgacgatccgtatatcgccgccggggtttaccgccaggtctcagttaagccgtataagaaggttttttgaaaataccctttcctttttctggctaaccacaaaaacacccaggtcatcagaatgaagggcgcattttggtacacgacattgaagtgtcgccctttttaacctcgcgaaagcgttgactgttatccgcctgagaagcctggaagatgagcacgcactttctcctgctaccccatcatcgaccatcgcctcgcttttttcggcaatggaaaatgctgacaaaacatcgacgccgcgcgtgatagtgaattactaataccttgtgtaaggctgttagggaggatcgcgttgttatttagcgcttgcatttaatgtcagcacatcctgatatagccctataaatctacagtgcaatagaatgaaaaaaaataactgaaagatagttgcttaacgacagacatgaaagcccgaaaaaaatattattgggcatccactgcggatgccgcggaaccgaacgtagcccatcttgctatattcaggaccgtagccgcttgaaagcacgtggaaataacccccctgtagacaaaggtttacctggcaggcataaagggatattaactacgctgccagcgttaagttgctgagcatcatttttaaagcctattaatttcgttgcgtaaacttcacgcagagtgatagtaggggcatcactgcttgattaaaaaatttgaaagggaataacaaatgttttcaataagccctgtatttttttgggctaacatttatgtacctgccgattttgaggattattgtgtgaataccctgaaaaaaaccgcattgctttctgtacttgccttatatattcctgtgtcgcaagccgcggctaaggaatacagtcttgatccacagcatacctcggttgtgatctcctggaaccatttcggcttctcaaaccctaccgcctatatctctgatgtttcagggaaactggcctttgataaagagaatccggagaaatcctcggtgaacgtcacgctgccagtgaaaaccattgacgctcacgtcaaggcgttaacggatgagtttttaggcaaagagtattttgatgttaaaacgtttcccgacgccactttccagagtaccaaagtggaaagcaaaggcgacaataaatatgatgtggaaggtaatttgaccattaaaggcatcaccaaaccggtggtcctgcatgccgtcctgaataagcaggatatgcacccaatggtgaaaaaagaggccattggatttgatgccaccggggtgataaaacgttcagactttaagcttgataaatatgtgccggcggtaagtgataacgtcaccatcacgttatccacggaagcctatgcaaaataagtaaaagctggcgcaacgattgcgttttattcaggatgcttattgcatggcctctctgaataatataacaggctcagattattcatggtcaggatcggtcggttcatttagcttcaacgcgctggaccgcttaataacccccttgcctgtctgagtctgttttctcattccctcagctcccgcctggttaccgcagctggccggtcatatcattaagcatttaacaacgccatgcccttcctgagcggcaataaaccctgagcggcaataaatgctatctgacggttaattcctgtcgcgccgcaaacgacttggctctggatcttgtcgtccgtcattacaagccaggcgtagcatctctctttcactgaggcgggagctctgttttgtcgtcgcatcgcagcatgaaaaaccatcattgccctatggcgatgagcaacgggaatttagcgcagagagaaaaacgacaacggcaccgcgtacggtgccgtttgcctgctcgcttagctgtcagggaagataaacagcagggcatgacgctgccgtttcaccagccccttcctgatagcgaggatccgcatattgcggcgcgattgggcttccagccagcgcgctttacggcgattcacctgtctcagcatgcgccagcgccctacttccgttctactacgcttcattgcaacgactctacgagtgaaaacagcccccattataaacctctgccagcaactgactaccgctttcgctgcgtttttatttgccagaaaaatactgatgcgtaaactcatcacatatcgtcattcaaaaggattttacatctatgacaaccttttacacggtggtgaactggctggtcattctggggtactggctgttgatcgccggtgtaacattacgaattctaatgaaacgccgcgctgtcccgtccgccatggcatggttgctgatcatttatatcctgccgctggtggggatcatcgcctatctctcctttggcgagctgcatctcggcaagcgtcgggccgagcgcgccagggcgatgtggccctcgacggccaagtggttaaacgacctcaaagcctgcaaacatatcttcgcggaagataacagcccggtggccgaatccctgttcaagctgtgcgaacggcgtcagggcattggcggcgtaaaaggcaaccagctacagctgctgacggaatctgacgacgtgatgcaggccctgatccgcgatattcagctggcccgtcacaacatagagatggtcttttatatctggcagcccggcggcatggccgacagcgtcgctgaatcgctgatggccgccgctcgccgcggggttcactgtcggctaatgcttgactccgcgggcagcgtggcctttttccgcagcccatgggcggcgatgatgcgtaacgccggtattgaagtcgtcgaagctcttaaggttaacctgatgcgcgtattcctgcgccggatggacctgcgtcagcatcgtaaaatggtgatgatcgataactatatcgcctacaccggcagcatgaatatggtcgatccgcgctactttaaacaggactcaggagtcggacagtggattgatctgatggcgcgaatggaaggcccggtggcgacctcgatgggcatcgtctactcctgcgactgggaaatagagaccggcaagcgcattctgccgccgcccccggacgtcaatatcatgccgttcgaagaggccagcggacatactattcacacgatcgcctccggaccgggctttccggaagatctgattcatcaggctctcctcaccgccgcctatgcggcgaaagagcatctgatcatgaccaccccctacttcgtacccagcgacgacctgctgcatgcgatctgtaccgccgcccagcgcggcgttgacgtgagcattattttaccgcgcaagaacgattcgctgctggtaggctgggccagccgggccttcttcaccgagctgctggcggccggggtcaaaatctatcagtttgagggcggactgttgcataccaagagcgtgctggtcgatggcgagctaagtctcgtggggaccgtcaacctggatatgcgcagcctgtggctcaacttcgagattaccctggtcatcgatgacgccggtttcggcagcgatctggcggcggttcaggatgattatatctcgcgctcgcgcctgctggatgcccgtctctggttaaaacgtccgctgtggcagcggatcgccgagcgactgttttacttcttcagcccgttgctgtaaaacgtgcccatcagataccgaatgagtagcaatcatggatatggatttaaacaaccgcctgaccgaagacgaaacgctcgagcaggcttacgatatcttcctcgaactggcggccgacaatctcgacccggcggacatcattctgtttaacctgcagtttgaggagcgcggcggcgccgaactgttcgacccttcggcagactgggaagagcatgtggattacgatctcaacccggatttcttcgccgaagtggtgattggtctggcggataccgacggcggggaaatcaatgatatcttcgcccgcgttctgctgtgccgcgagaaagatcataagctgtgccatattctgtggcgtgaataacctttaacatccagtaaaaagcctgccgcggttctcccggcaggctttttttacgtcgccagcttacttcggcaaggcatgaccgcaggcatggcagaaacgggcgttatcgtcatggtcgccctgctgacactgcggacacaggcgctgctgtcgtcgacgattcagggcgctggtcatatgcgtggtgataagtccggtcggtatggcaataatggagtagccgatcaggataagaatggaggccaggatgcgacccaacggcgtgtgcggcgtgatgtctccgtagccgacggtggtgatggtcacgatggcccaatagaccgaggcgttaagcgtggtaaagccgtattccggcccctcaatcagatacattaacgagccgaaaatcaccatcacaatggcgataaacgaataaaacaggatcagctgatggcgcgcgctgacaatcgctcgccagaacacgttgagcgaaggcataaagcgcagtagtttgagaatacgcagcgcgcggatcgcccgcattgcccgccaggcgaatacataattgaggctaatttccggccatagccacatcacatacagcggtaaaatcgtcgccaggtcaatcagcccccaaaagctgaaaatatagtggagcggattgggccaggtagcgatacgcagcaggtattccagggtaaagaccgcggtcaccagcagctccagccagacgaaaatatgccattcatctaatgtcaggtgatattgcgtgcccagtcccgactcgataaatatcaccagtacgctgagcagggcgaaaagtccgcacagcccttcaaagcggcggccggaacgtcggttctgatcgaaaagtaaatgataaagccgcagacgagcggcagaaagcatacccacttcgttaacctcgcaaaaaaaaagggctgacctgcgtcagcccctgagattataacgggtctaccttaaggcaggaaaccgcatggcggaaactgccttccagcaccgggcgggttttggcgcactccggtccggcaagcggacagcgggtgcggaatacgcagcctgagggcggattaatcggcgagggtaattcgccttccagcagttggatagttttcgttttctcgagatcaggatcggggatcggcaccgccgacatcagcgctttggtatagggatgcagcggattatggtacacctcgtcgtaggtccccagctccaccgcatggcccagatacattaccagaacccgatcggagatatgcttaaccaccgccagatcgtgagcgataaatatcagcgatagccccatctcacgctgcagttgctgcagcaggttgacgacctgcgcctgaatcgacacgtcaagcgcggagaccggctcatcgcagataatcagctttggctcaaggatcagcgcccgcgcgatgccgatacgctgacactgaccgccggagaactcgtgcggatagcggttgatcaggttgggcagcaatccaactttcatcatcatcgctttgacgcgatcgcgcacttcctgacggggcatcttcggatgataggtacgcagcggttcggcgataatttctccgatggtcatgcgcgggttcagcgaggccagcggatcctggaagatcatctggatatcgctgcgcacgtcgcgccactcttcctgcttcatgcccagcagatctttacccagccaggccactttgccatcggtcgctttcaccagaccaataatggcgcgggcgaaggtcgatttgccgcagcccgactcccctaccacaccgagggtttcaccctcgtaaaggcgcagcgtcacgccatccaccgctttcagcgttttcgacggctgccagaaccactgcttgccatctttgatatcgaagtgcaccttcaggtcggcaatttcgagcaggacttttcgttgttcagttacggcgttcatagcagatcccccaccggtttaaagcaggcgcgcaggcagcctggcgcgaacgattccagcggcggcgcgctgctgcactgctccatggcatgcgggcaacgcggctggaatggacagcctttcggcaatcgcagcaggttcggtgggttgccgggaatggtcaacaacgcatcgccttccgcatccagacgtggaaccgcattcaacagcccaatagagtatgggtgcgacggttgatagaagacatcgcgcgcctgaccgtactccatggtgcgcccggcgtacatcaccagcactttatcgcagatacctgccaccaccccaaggtcgtgggtgatcatgataatggccgtgttgaattcgcgtttaagctcattcaacagcgtcatgatctgcgcctgcacggtaacgtccagggcagtggtcggttcatccgcaatcagcagccggggccggcacagcagcgccatggcaatcatcacgcgctgacgcatgcccccggagaactcgtgcgggaacattttcatgcgcttacgcgcttccggcatttttaccgcgtcgagcatcttcaccgactcttcaaacgcttcggctttactcagccctttatgcagcatcaggacttccattaactgctcgcccacccgcatataggggttaagagaggtcatcggatcctggaaaatcattgagatttgttcagcgcgcagtttgttcagctcacgctcgggcaaattgaggatttgccgaccgttaaaggtggcggaacccccgatgcgaccgttggccgccagcagtcccatcagggcgaaggcggtttgcgatttaccggagccggattcgcccacaatgccgagcgtctcgcccgcctgcagggtgaagttcagatcattgacggcggtgacgtcgccatccggcgttttaaaggtgacgcgaagatctttcacgtccagcagtagcccgctgtggctctgcgcttgcggcgcttttgccgtttcaatcatggtcatggcagcgctccttagcggtctttcgggtcgagggcatcacgcagaccatcgccgataaagttgaaacagaacagggtcaccaccaggaaacccgccgggaacaacagtagccagggcgaaacttccattgagttggcgccatcgctgagcaatgccccccagctgctgagcggctcctgcgtccccagtcccaggaaactgaggaaggattcgaagaggatcatgctggggaccagcagcgaggcatacaccaccaccacccccagcacgttggggacgatatggcgcagaacgatgctcgccgtcgagaccccgccgacctgcgcggcttcgataaactctttgcgcttcaggctcagcgtctgcccgcgcacgatacgcgccatatccagccaggacaccataccgatggcgacaaagatcagcaggatattctgaccaaaaaaggtcaccagcaggatgacgaagaacataaacgggaaggagttgaggatctccagcagacgcatcatcaccgaatccactttgccgccgagataaccggagagcgaaccgtacagcgtgccgaggatcaccgccaccagcgccgccgccaccccgaccatcagcgaaatgcgcccgccgatcgctacgcgcaccagcagatcgcgcccggaggagtcggttccgaagtagtggccggaggccatatccggagcattggacatcatgccccagtcggtatcgaagtaggagaacgacgacaccatcggcgcgaaggtaacgaacagcgcaataagcaccagcataatcaggctggtcaccgcggcgcggttatgcataaagcgacgacgcgcatcctgccagaggctacgcccctccacttccagcttctcactgaagttttccagcgcctcgctatttttcttacttaacatcatggcgaactccggcttcagtagcgaatcttcggatcgataacggcgtacagcacgtcaacgatggcgttgaacaggatagtcagggcgccaacgaggatcgtcaggctgagcaccagcgagtagtcgcggttaagcgccccgttaacgaacagctggccgatccccggcaggccgtaaatggtttcaatgaccattgagccggtgataatgcccacgaaagctggccccatataggagagcaccggcagcagcgccggcttcagcgcatggcgcagaataatgcgacgcatcggcagccccttcgcccgcgcggtgcggataaagttagagtgcagcacttcaatcattgagccgcgggtgatacgcgcgatgctggcgatataggccagggaaagcgccaccatcggcaggatcataaatttcagcgccccgccgttccagccgccgcccggcagccagtgcagggtaatggcaaagatcatcaccagcagcggcgcgaccacaaagctcggaataaccacgccggtcatggctacccccatcaccgcgtagtcccagcgggtattttgcttcagggcggctatcaccccggcggcaacgccgatcaccaccgccagtaaaaaggcggcgaagcccagtttcgctgaaaccgggaagctggcggccaccagatcgttgacggaataatctttgtatttaaaagagggaccaaaatcgccatgcgccagctgcttcagataattgaagtactgcgtcatgatagggtcgtttaaatggtattttgcttcaatattcgccatgacttccggcggtagcgtgcgttccccggtaaaaggacttcccggcgccagacgcatcatgaagaatgagatggtgataagaataaatagcgtcggaatcgcttccagacagcgacgtaagataaattttaacattgcccgtaccttctggcgtgtgcctttgcactgctctcaaataagacacgatggagcgagccgagacccgctccacgtattgccattaatgtttgataacgtagaggtctttggtatagacgttatccatcgggtctttaccggtatagccaccgacccatggtttcaccaggcgggcgttaacgtagtaatagaccggtacgatcgcgctgtctttgtccagctgctgctctgctttcgcataggccgccgtgcgctgcgcttcatcggatgcttttacggattcagccataatcttgtcgaacgccgggctcttatagtgcgcggtgttcattgaactgtcagagagcatggtgttcaggaaagaggttggctcgttatagtcggcgcaccagcccgcacgcgccacgtcataggtgccctgatgacgggtatcgaggaacgttttccactcctggttgaccagcttcacgtcaatgcccaggtttttacgccacagcgaggcggcggcaatcgccagcttcttgtgcaaatcagaggtgttatacagcaggttgaaggtcaacggtttatcggcgctatagccggcttcggccagcagtttcttcgcttcttcgttgcgtttttcctgcgaccaggtaaaccattccggctcgctcagcttcgcgccatcggtatacggtggggtgtagccgtaggccggcagatcgccctgtcctttcaccttattagcaataatatcgcgatccagacccagcttcagcgcggtacgcacgcgcacgtcggtgaacggggccttctggttgttgatttcgtaataataggtacacagataggggtcaacgtgcagctcgttggggatctcttttttcagcttctggaagagttcgatcggcagctggttataagtcatgtccagttcaccgctgcggtagcggttaacataggtcacttcggaagaggtcggcagccaggtaacggtgttaatgacggttttagcattatcccaatagtgcgggttacgctccatcacgatccgctcgttgaccacccagtctttcagagtatacgcgccgttggtaacgatattgccaggctgcgtccacttttcgccaaatttttcgatggccggtttgtagacgggagacatcgccgggttaaccagcagtttataaaaatagggtaccggttcgctgagggtgacttccagcgtgtggtcgtcaatggcttttacgcccagctcgctcggcgctttcttgccgtcaatgatttcgtcgacgttaacgatatgaccatattgcggatagctggcataaggagacgcggttttcggatccaccagacgctgccagctgtatacgaagtcctgggcggtaaccggctcgccgttagaccattttgcatctttacgcagatggaaggtccagactttaaaatctttattatcccagctctccgccacgccagggatcgggtggccatctttcggcgaagtattcagcaaaccttcgaacaggtcgcggctaatattggcctctggcaccccttcgattttatttgggtccagcgattgcggctcggcgccgctattacgtaccagggtttgcttctctgccagctgcacaccagccgggacatccgctgccattgccatattgccggcgatcagtgcggatagcactcccgcggcgattaaacgctttttagtgatgatggtcattgtgttgtaactccagtcattataattactggttttttaaccagcctgtttttcccgttttcgggttctgtccaacgcaggagtttgcgattggcagattgctatcaccgacttatttattacgaccgctcgaacggcagtcttaacgtcgattcgttgccctcgctggagggtcgttctggcgaaatgagttaattaaaaataattctcatttgcgtacataattcagcagacgataacggcggaaagtaccaaaaggtaaacacctccgccaatgcaatttgcaaatatgttaccgaattctcttttattgccggttttgccagcgtgacaagcgtttgccataaaacgtcgatgtaaaaatattattatttatcagagcattacgataatttcatcagccagcatactgagcagcgaccacaagatggttttttgtacaaaaatttaacaatagattactttttagcacattcatctgccgccttgttaaaattactaatatcatttcgatgatccgacagcaagtaccagagaatgatgtgaagaaaataacatcacaggagggggaggcgtgaggagaatgttaagagaaatatttcatatcttaatgaaaaacatgaaattaatagcgatatcgcaaaatattattcctaccgccagctccgcgctggctaataggttttgctaataatcgcgcaggcgtgaagcgagactccccgcctgctggcgacgaactaactcagcagccctgggaaaagcgctttaatcccggtcacaataaactcaatgccgagggccatcagcaacaggcccataatacgggtgatgacgttgattcccgtctgccccagcaaacggaccagccacggcgccatacggaaaatcccccagcagcagagggcaaataccgctatcgccagtgagaacccgaccagatgcacccaggagtggtaccgggtcccccagacgatagttgaactgattgcccctggcccggccattaatggtagcgcgagaggaacgacgccgatgctctcccggaccgccgtctccgacttttcctgcttgttctgcttatcttcgccgagcttaccgctgatcatcgacatcgcgatggtcaccaccaggatgccgccggcgatacggaaggagtcaatggagataccgaaaatctgcagaatgccatcgccgaggaacagcgacgtcaggaggatgatcgccaccgacaggttggcggtgaggttggtcttattacgcaccgcagccggctgatagctggtcatactgatgaataccggaataatgccaaccgggttaaccagggcaaataagccgatgaaaaacttgaaatatgcagaaaaatcgaacagtgattgagtcacattgggctccgcagcatcatcaaaattggcggttgactgttaacagcataaaataactgcgcgaaacatacgctttttacctgcaatattcattataaatatgcataacccggtgatatgtatcgaatgttagccatttgtatatttaatgctaatcgtttttttaatttcaaaaccctcccatcacacttgatcgaaccggtcaaaaagcagccagctgaaaggtatcagcagcgacaatacttgatctaaatcacgtaatttgtactcagaagtgagtaatcttgatgacaccaacagagtggaaggcagcagtacctgaaagcgaaagagataaagcttttttagtaaatcggtgaaacagcgccctgatttttctacataaacatttacatgcaagctgttaacggcctgtctataatgtcgaatcgagcgactgatttactaaaaaagtttaacattatcaggagagcattatggctgttactaatatcgctgaactgaacgcgcttgttgagcgtgtcaagaaagcccagcgtgaatatgccagtttcactcaagaacaagtcgacaaaatcttccgcgccgccgctctggccgctgcagatgctcgaatccctctcgccaaaatggccgtagccgaatccggcatgggtatcgttgaagacaaagtgatcaaaaaccacttcgcttccgaatacatttacaacgcttataaagacgaaaaaacctgtggcgttctgtcagaagacgacacctttggcaccatcactattgctgagcctatcggcatcatctgcggtatcgtaccgaccactaacccgacttcaacagccattttcaaatcgctcatcagtctgaaaacgcgtaacgccatcattttctctccgcacccgcgtgcaaaagaagccaccaacaaagcggctgatatcgtgctgcaggctgccatcgcggccggcgcgccgaaggacctgattggctggatcgatcagccgtctgtagaactgtctaacgcgctgatgcatcacccggacatcaacctgatcctggcgaccggtggtccaggcatggtgaaagcagcatacagctccggtaaacctgctatcggcgtcggcgccggtaacaccccggtagtcattgatgaaaccgccgacatcaaacgtgccgtagcgtccgtactgatgtctaaaaccttcgataacggcgtgatctgtgcttctgagcagtccgttgtggtggttgattcagtctatgacgcggttcgcgaacgtttcgccagccacggcggctatctgctgcagggtaaagagctgaaagccgttcaggacattatcctgaaaaatggcgcgctgaacgcggctatcgttggtcagccagcggccaaaatcgctgaactggcaggcttcaccgtgccggccaccaccaaaattctgattggtgaagtgaccaacgttgacgagagcgagccgtttgctcacgaaaaactgtctccgacgctggctatgtaccgtgcaaaagatttcgaagacgcggtagccaaagcagaaaaactggtcgccatgggcggtatcggccacacctcttgcctgtacaccgaccaggacaaccagccggctcgcgtggcttacttcggccaaatgatgaaaaccgcgcgtatcctgatcaacaccccggcttctcagggtggtatcggtgacctgtacaacttcaaactcgcgccttccctgactctgggttgtggttcctggggtggtaactccatctctgaaaacgttggtccgaaacacctgatcaacaagaaaaccgttgctaagcgagctgaaaacatgttgtggcacaaacttccgaaatctatctacttccgtcgtggctccctgccaatcgcactggatgaagtgattaccgatggtcacaaacgcgcgctgatcgtgactgaccgcttcctgttcaacaacggctatgccgatcagatcacttccgtactgaaagctgcgggtgttgagacggaagtcttcttcgaagttgaagctgacccgacgctgaccatcgtacgtaaaggtgccgacctggcgaactcctttaaaccagacgtgatcatcgccctgggcggcggttccccgatggatgcggcgaaaatcatgtgggtcatgtacgaacatccggaaacccacttcgaagaactggcgctgcgctttatggatatccgtaaacgtatctacaagttcccgaaaatgggagtcaaagccaagatggtggcgatcactaccacttccggtaccggttctgaagtgacgccgttcgccgtggtgaccgatgacgcgaccggtcagaaatacccgctggcagactacgcgctgaccccggatatggccattgtcgatgccaacctggtgatggatatgccgaaatcgctgtgtgcgttcggtggtctggatgcggtgactcacgccctggaagcttacgtttccgtactggcttctgagttctctgacggccaggcgctgcaggcgctgaaactgctgaaagagtacctgccggcttcctatcacgaaggttccaagaacccggttgcccgtgagcgcgtacacagtgccgcgactatcgccggtatcgcgttcgctaacgccttcctcggcgtgtgtcactcgatggcgcacaaactgggttcccagttccatattccgcacggtctggccaacgccctgctgatctgcaacgttatccgctataacgcgaatgacaacccgaccaagcagaccgcgttcagccagtacgaccgtccgcaggctcgtcgtcgttacgctgaaatcgccgatcacctgggcctctccgcaccaggcgaccgcaccgcagcgaaaatcgagaaactgctggcatggctggaaagcattaaagctgagctgggtattccgaaatctatccgcgaagctggcgttcaggaagctgacttcctggcccacgttgataaactgtctgaagatgcattcgatgaccagtgcaccggcgctaacccgcgctacccgctgatctccgaactgaaacagatcctgctggatacctactacggccgcgaattcgtcgaaggcgaagccggtgcgaaagccgaagttgctccggtaaaggctgagaaaaaagcgaaaaaatccgcttaaccaacagcgatagcatcgcgacaagccccgtcacctgacggggctttttttatccccgctatcagccattctttatcgccagctccgccaacctatagcagacattaaaaaggcgcccacaggcgcctgtacgagcttctgagcgtatcagcagggacggtgctggttttgtaccttggttaacgaaccgacgctcagcgcctctttataatgcttacggcagaccgatacgtaccgctcattaccgccgatgacgacctgctcaccctcattataaggacgcccctcctgatcgaggcgcaataccatgctggccttgcggccgcagaagcagatcgttttcagctcaaccagcttatctgaccaggccagtaaatactggctgccggtaaagagctcaccgcgaaagtccgtccgcaacccatagcaaagcaccggaatatccagcgtatcgacaacttcggacagctcatgaacctgttcacgcgtcagaaactggctttcatccaccagcacgcagtgaatcggctttagctggtgctccgccgcaatatcgtcaaataacgaggtctgtggattatacaatcgggccggcgaggagagcccgatacgcgaactgacttttccggcgccaaagcggtcatcaatctcagcggtataaacgacggtacgcatcccccgctcctggtaattgtacgaagattgcaacagagcggtcgacttacctgcattcattgcagagtagtagaaataaagttgtgccatcggctgcgtgaccccaatcaaagtgttttatcgcggcgacgattgtaccatattttatgcgcacagccgcgctttcagcaggggtattgtcgcgaagctgaagggcctgcaaaccgaaaggattaagaagatgaattgaattttcagggccactatttgtacgccccgttacgctactggcgcggtaaccattgtcttttcgtgcttatagaccggttgcccaagggctataagcagggctgccggttgttttatattaagccttgtaaccaaaaatgcgctaatactgacgagggttatttacccatgtaaaggatcatttctctcactgaacctctcaaaaagcataccgtctcaatgttttagcttgccttcgcctcatcgctataagcgatgaaagatgtgaagcggcacgggaattttaacttaaattaattaattctcgcgacaaataaccagtaattttgaattccttacattcccccctattgcacaacgcattttatcgctctattattagttcaacaaaccaccccacaatataagtttgagattactacaatgagcgaagcacttaaaattttgaacaacatccgtactcttcgtgcgcaggcaagagaatgcaccctggaaacgctcgaagaaatgctggaaaaattagaagtcgtcgttaacgagcgccgtgaagaagaaaacgctgccgcggcagaaattgaagagcgtacgcgtaagctgcagcaataccgtgaaatgctgattgctgacggtattgatccgaatgaactgctgagcaccatggctgccgttaaagccggtaccaaaaccaagcgtgctgcacgtccggctaaatatagctatgttgacgaaaatggtgaaaccaaaacctggaccggtcagggccgtaccccggctgtgatcaaaaaagcaatggatgagcaaggtaaatcactggacgatttcctgatctaatctccgttgatcgctataaaaaatcccgctgcggcgggattttttttgccctcagggccgatataaaaaaaccgggagtcgcagatgcgctcccggtttgtgctttcaaccgcgcggcggattacttcgctaccgccgtttccagccaggctttaaaatcgtcgcccagcgttttgtgacgaataccatattcgacaaacgcctgcatgtagccaagcttattaccgcagtcatggctcttgcctttcatatgataagcttcaaccgtttctttctcgatcagcatatcaatggcgtcagtcagctgaatttcatcaccagcgcccggaggggttttcgccagcagcggccagatatcagcgctgaggacataacgccccaccaccgccaggttggacggcgcaacgtcagcttttggcttctcaaccacgcccaccatcggtacgctttcgcccggcttcagggattcgcctttgcagtcaaccacgccataagcggttacgtcttcgacaggttcaaccataatctggctggcgccagtctcatcgaagcgagagatcatctcagcgaggttatcgcggctcagatcggattcatattcatccagaataacgtctggcagaataaccgcgaccggctcatctcccactaccggatgggcgcacagcaccgcgtgacccagacctttcgccaggccctgacgaacttgcataatagtcacgtgcggcgggcaaatagactgcacttcttccagcagctggcgttttacacgtttttccagcatcgcttccagctcaaaactggtatcgaaatggttttcgatagagtttttcgacgagtgcgttaccagaacaatttcagtaattcctgcagcgatacattcattaacaacgtactgaattaacggcttatctaccagcggcagcatttcttttggaatcgctttggtggccggcagcatcctggtgcctaatcccgcaaccgggataaccgcttttctgactttagaattaagggcagccattgaaatctcctggactgtttgttttttaaacttctcgttacaaataacgtgtcgagtatatcagtcaaccgcgtatttactggtctgaaaagctgccgatagcctcgaattaggacttttacgcataaaactgctcgatgttaccaccgctaaagggcaacaggtaatcccgtctgcttagatataaacgcaattgctcattccgcagacaacattaagcgtaaacgaccgccagccccccaaatttggcactgccacgaggtgcagcgttggctaatttggttaagataagcatcacccagcgtccccaaaggaacgccattactaatctgaatttgatgctcccctgtattcagcgtgccattaagtcccgctgacaccagaattaaatttttcagcccgctgtggtaataccctactaacagagggaactggcccggaagatttgcctgacgcagcagttgattcacctgttttaacaaacttcccatttctggtagccgttgtccctggtgcgccagttgctcctgcagcagaccattaaacaacgcgcgcagcaataatgctgccaacacgccattatcgcctgcgcgtgtgacatccagacaatagaaagccaaatcattttccgaaagcggcgcgatatcgagtaccagaccgggcttgtctgccgacaccagttgtcgataatgaacgcggcagtgcgacatttcctgttgcaccggcggctgtaattcctgcaatagtcttgaagcggcgatgggattactgaccagcgcatcccagtcctcaaataaacgctcttcctcttccacgcgcgaactgaacatcgcgggatagagacaggcgtaaacggtctcgcgcaggcgatcgaaatcttttactggctttaacagcacgtcctggacgccaagtcgcaacgctttagctatatccgccatgttttcggtggcggagatcatcaggatcggtaactgttcgccgcggttacgcagcgtttccaccagctccagaccgttcattctcggcatagaaatgtcgcaaatcatcaggtccggatgcacctccgtcattttatgcagggcatccttgccatcttccgcctggaaggttgttgctcccagcgaggtcagccatccatgcaagagtgagcggaaaacgggttcgtcttcaactatcagaatctgttttcccgccaatggctgcgtcatgatatctcccctggctgacgataattcaatagtggcacgctattctcactatcgcctgtcagaatttgcttaagtcagtaactcgtacgtcaaacggctgtacgcactaagggtaataattcatccattttcttttctaccgccagttgccccgcggcaatcgcctctccggcgcgatgaaaatcaagcgtcgaaacttgcggacagtatggctgcaacaggatatccggcgggtcacccgccatacgattgcgtttaagacggttttccagtacctggatagaggtggtcatgatctccatcgccgtcggcgtcacggccgtacggcgggaactcattcgcgtcaagcgagcgcgcagacgagtatgccatggcccctccttctcttccgcttcctgccgcggcgtttcaagggagaacaaatcctgctgcataagatgggcatcatgttgcaggtcgacggcaatcacaatatccgctcccattgcccgggtgagcgacacaggaaccggattgaccaccgcgccatcgaccagccagtaaccattatgccttactggcgacattaaccccggcatactacaggaggcgcgaatggctaaatgtagatcgccttcggtaaaccacagctccctaccggtgcttaaattggtggcaacagcagcaaaccggcgctcgcagcgttcaatctcggtgacgggcataatgcggcggtaatgattgaataccttttccccccgcagcagtcccccccggcgccaggagagatccatcagcttcaggacatcccagttgctgaatgagcagacccatgattcgagtgccgggagtcggttacaggcatacgccgcccctaccagcgaaccgatagaacaaccggctacgatatcaatctcaataccggcccgctggagggcgttgatgacgccaatgtgcgaccatccgcgagcggctcccgcacctagcgccagaccaattttaagctttctcattagtactaataactatccttccactctgagcgtggcaacattgtcacggctcagttaacataatgccctttggcgtagaagcgccgttactctttcttccatggaggcagttttgtcgcaattatgcccctgtggcagcgcactggagtatagctcatgttgccagcgatatctgtccggcgctgagcttgcgccgggcccgtcacagcttatgcgctcccgttatagcgcgttcgtcatgaaagacgctgactatctaatcaaaacctggcacccgtcctgtcaggcgcagcaatttcgcgccgagctggagaaagggttttcccagaccgaatggctgggcttaaccctgttcgccagtgatgaggggcgagctccaaatgaaggttttgtcagctttgtcgcccgctttaatgacaataaccgccctggcgccattattgaacgttccagattcttaaaagaaaatggacagtggtactatatcgacgggacacgaccgctgattggccgtaacgacccctgcccctgcggctcaggtaaaaaatttaaaaaatgctgcggccagtaacgctggcgcagcgcttgcaaacattacaggattttcctcgcgatgcattcattacaacgtaaagtactacgcactatttgccctgatcagaaaggcctcatcgcgcgtatcaccaatatctgctacaagcatgaactcaacattgtgcagaacaatgagtttgttgaccaccgtaccggtcgtttctttatgcgcaccgaactggaaggcatttttaacgacgctactctgctggccgatctcgacagcgccctgcctgaaggctccatccgcgaactaaatccggcaggccgtcgccgggtggtgattctggtgacgaaagaggcgcactgtctgggcgatctgctgatgaaagccaactacggcgggctggatgtcgatattgccgcggttatcggcaaccatgacaccctgcgctcgttggtggagcgctttggtattccgtttgagctggtcagccatgaaggactgagccgcgaagaacacgatcagcggatgggcgatgctatcgccgcccacgaaccggattacgtggtgctggccaagtatatgcgcgtcctgacgccagagtttgtcgcccgcttcccgaacaaaatcatcaatatccaccattcgtttttgccggcgtttatcggcgcccgtccctatcatcaggcctatgagcgcggcgtgaaaatcattggcgctaccgcccactacgtgaatgacaatctggatgaaggcccgatcatcatgcaggacgtgattcacgtcgatcatacttataccgcagaagatatgatgcgcgctgggcgcgatgttgaaaaaaacgtcttgagccgggcgctgtatcaggtactggcgcagcgcgtcttcgtttacggtaaccggacgattattctttaatcgactgagaaatgaattggttagctttacggcgttacgtgtaaaaatcaggcaaccagtttatttttgtcaaacgaatgctttacaggggcgcatcatttggtatgatgcgccccgcttcccgagaaggaagcaggccagtaccaagcattaccccgtggtggggttcccgagcggccaaagggagcagactgtaaatctgccgtcatcgacttcgaaggttcgaatccttcccccaccaccattattcactacagtgatatggtttccccgacaagcgtaaacgatgtttgcacttagcgggaagggtaagaaccttcgactaaggttcgactcgagcgccagcgagagaacgttgccacaggcaacggcccgaagggcgaggagagatagcgacgagttatccttcccccaccaccattcattttgctgaatagcctacaatgtgattttacccctggtggggttcccgagcggccaaagggagcagactgtaaatctgccgtcatcgacttcgaaggttcgaatccttcccccaccaccatcttcttaaaaaacacctcaatccaattactctacgatattctatattctgccccatggggaaggatgagaagcttcgactaaggttcgactcgagcgccagcgagagaacgttgccacaggcaacggcccgaagggcgaggcgctttagcgccgagtaatccttcccccaccaccatcttcttaaaaaacacctcaatccaattactctacgatattctatattctgccccatggggaaggatgagaagcttcgactaaggttcgactcgagcgaagcgagagaacgttgccgcaggcaacggcccgaagggcgaggcgctttagcgccgagtaatccttcccccaccaccatctcttcatgtattgcccagcttattccacctgcgatacgctatattctgccccacggggaaggatgagaagcttcgactaaggttcgactcgagcgaagcgagagaacgttgccgctggcaatggcccgaaggcgaggcgctttagcgccgagtaatccttcccccaccactgttgtactctcagcgaccggtcctgctgtctcatcgctcgcgcttcgcttagcgaggctacaagtggtgccgtctggtagcccggacaggtgcgcagcaccgcctccggaaaaactcacagcggtggcaaccgcctttttaccggcgagcttttcaccaccgaggtgttacactgcgcatactccgccagaccgtccagcagggtatccagctgggcaatatcgcgcaccacgagacgcatcacaaaacaatcttccccggtcaccttgtcactttcaatacattccggcatcgcctggatatatttatccaccttctgcagcagcccaggcagcggacggacccgcaccagcgcctgcaggctatagcccagcgcggcgagatttacccgcgccccatagccctgaatgacaccccgctcctccaggcgcttcacccgctcggcggtgctcggcgaggtcagccccacccgcgcgctcaggaccttgagcgaaactctggcatcctgagtcaggcaggtgaggatcgcccggtcaatttcatcaagtacgtcattcatatatttcacctaattataaaaggcattttcccccttctaccttaattcagccatatcaccctgtcagggtttttcgcacaataactaaaaaatggtggaggtgaaaaatgcaacttacccgcggcgtctggcagatgagcctggcaatgataatctccggctcgatcggcgcgttcgtgctgctctctggtttgccggtgactgatgtggtgttctggcgctgcctgattggcgcgctaaccctgctggtgtttatcgtgttaagccgccagcccttcagccggctaacgcgtttcactctcgctctggcggtgattggcggcgcggcgctggtcgtcaactggctgctgctgtttgccgcctattcgcggatctcaatcggtatggccaccgtggtctataacacccagccgtttatgctggtactgatggggatggtgctgggggaacgggtcagcgccgtgaaatggggatggttactgctggcctttggcggcgtagtgatcctgctgtcgagcgagctgacgcctgcacacgaagaggggcttaccaccggcgtgttgctggcgctgggcgcggcattcttctatgccctgaccgccatcatcgcgcgcaaactgcatccgctccccgcgcagcatatcgccttcattcaggttctcgtcggcgtcgtgatgctgctgccgctggtgcatgccccagaattgacggccagcttcccctggcgctatctgctgatcctcggcatcgtccataccgggatcatgtatcagcttttatatagcgcgatacagaaactgccgacgcccgttaccggttcgctctcctttatttatccgctggtggcgatggtggttgactatctggtcttccaccatgcgttatccgcggtgcaattgctcggtgggatgcttattctgtttgccgccgcagggaataatctcggctggggcgaaaaaaaaccccgccgcggcggggtcagtgagcagtcgcgggccagttagcgacgggcgcggacaatctggtatttgcgcgtcaggtattcgaccggcgcgctccagatatgaaccagacgggagaacgggaacagcaggaacagggtcatgcccagcaccaggtgaacgcggaaaataaacgccacgccatccagatgctgtgacgcgccgccgtggaacgtcaccaccgactgcgcccagccgaccagtttcatcatttcactgccgtccatatgctgagcggagaacgggatcgtcagcaggccgagcgcacactgcaccatcagcaacgagaggatcagaatatccgctccggtggtggtggcgcgaacgcgcgggctcagcagacgacgcttgagcagcagtaacccgcccaccagggtcatcacgccgcaggcgccgccggcgatcatcgccatcttctgcttgacgtcgatcggcaggaaggactcatacatccagtgcggggtcagcatgccgaggaagtggccggcgaaaatacccaggatgccgatatggaacaggttcgacgccaggttcatccccttacggtccagcatctggctggaggcggcgcgccaggtgtactggccatagtcatagcgcaaccagctgccaatcaggaacaccgaacccgcaatgtacggataaatgtcaaagaagaacatattcaggaagtgcattattgctgtcctccgttagagatattcagatattgcggggccacggctccggcaaaacgacgctggtgagcggaaatttccgactcgccgcagccctggtcggcaaagaatttgacctgttcttcttcccagacggcgtccagcgcctgcggcgtatcgtcgcgcgcttcgtcggcaatcttctccgccaccttctggctgtcgacctgcgtattggccagcttcagcaatagctcgaacagcaccgcatagcgactttcgcgctgctgcaggcgcgcgctgagcagaccgaggatcggcgcgacgtcccgcaggccgccaagcgcttcctcttccggcagctgcgccagatactccagatatagcggcagatgatccggcagctcatggctatccagcagcagaccgtggcgctcgtactgcgccatcaggtcgaccatcgcctgcccgcggtcgcgggattcgccgtggacatgttcaaacagcagcagcgaggtggcccggccgcggtcaaacagttcgctataggccgcctgggcatccagcggatcctgagccactaaatcgcgcaggaaaacgcccagcgcgtgggcatcctctttgctgagtttctctgatgacgcgagcgcctcgaacatctcctgctgatgctgccataaggcagcgtcaggatattcgagcagacgcgatacaatcacgagttcaatcatgcgtgcggctccgttttgctggtcacgtcgatggcgtcgatgcgacggctgttgaacaggttgaactgactgtcagagccgtggcagccatcgccaaagctaaagccgcagccgtttttctccggaaacgcttctcgcgcctgttcacgatggctgctcggcaccacgaaacgatcttcgtagttggcgatcgccagatagcgatacatttcctgggcctgcgcttcgctcagccccacctcttccagcgcgcgggtatcgacgacgccgtcaacggtttccgcacgcttatagtggcgcatcgccagcattcgtttcagcgccagcagtaccggctgggtatcgcccgcggtcagcaggttcgccagatattgcaccggaatacgcaggctttccacgtccggcaggatcccgttgctacccagttcacccgcatcggcggcggactgaatcggcgacagcggcggcacgtaccagaccattggcaaggtgcgatattccgggtgcagcggcagggccagcttccagtccatcgccattttgtaaaccggcgactgctgcgcagcttcaatgaccccctgcggtacgccatctttcagcgcctgctcgatcactttcggatcgttgggatcgaggaacacgtccagctgacgctgatacagatctttctcgttctcggtgctggcggcgttttcaatcgcgtccgcgtcgtatagcaggacgccgagatagcggatacggcccacgcaggtttcggagcacaccgtcggcatcccggattcaatacgcgggtagcagaagatgcatttctcggatttcccgctcttccagttgaaatagatcttcttgtacggacagccggtgatacacatccgccagccgcggcacttgtcctggtcgatcagtacaatgccgtcttcttcacgcttatagatggcgccgctcgggcaggtcgcgacgcaggccgggttcaggcagtgctcgcacaggcgcggcagatacatcatgaaggtgttttcgaactggccgtacatcgccttctgcatgttgtcgaagttctgatctttggcgcgtttttcaaactcgccgccgaggatctcttcccagttcggaccgctggtgatcttgtccatccgctgaccggtgatcagcgagcgcggacgggcgatcggctgatgtttgctctccggcgcgttatgcagattctggtagtcataatcaaacggctcgtagtaatcatcgatgcccggcagatgcgggttggcgaagatttttcccaacagcatcgcgcgattgcccatgcgcggctgcagtttaccgttgattttgcggatccagccgcccttccatttttcctggttttcccagtcgttcgggaaaccgacgcccggcttactttccacgttgttgaaccaggcgtattccatcccttcccggctggtccagacgtttttacaggtcaccgagcaggtgtggcagccgatgcacttatcgagattcagcaccatgccgacttgtgaacgaattttcattttacgctctcctgtacctggtcgttgccttcgccgtctaaccagttaatgttcttcatcttacgtaccaccacaaactcatcgcggttggagccgacggtgccgtagtagttaaagccataggccaggtggccgtagccgccgatcatgtgggtcggtttcggcgtaatacgggtgacggagttatggatccccccgcgctgaccggtgatttcagagcccggcaggttcacgatacgttcctgcgcgtgatacatcatggtcatcccggctggaacgcgctgactcaccaccgcacgcgccgtcagggcgccgttggcgttgaacacttcgatccagtcgttatcttcgatacccagatctttcgcatccgcttcgctcatccagacaatcggcccaccgcgcgacagggtcagcatcagcaggttatcgctgtaggtcgagtggataccccatttctggtgcggggtcaggaagttcagcgccttttccgggttgccgttggacttctcgcccatcaccgctttcaccgaacgggtgtcgatcggcggccgatagaccagcaggctttcgccgaagtcgcgcatccactggtgatcctgatacagcgactgacgtccggtcagcgtgcgccacgggatcagctcgtgaacgttggtgtaaccggcgttataggagacatgctcatcttccaggccagaccaggtcgggctggagataatcttccgcggctgcgcctgaatatcgcggaagcggatcttctcgtcttctttgttcagcgccagatgcgtatgctcgcgaccggtgatctcgctcagcgcttgccacgctttcaccgccacctgaccgttggtttccggggccagggtgaggatcatttccgcggcgtcgatggccgtttccagcttcggctggcctttcgccgggccttccgccttggtgtagttgagcttacgcagcagatccatctcgctctgggtgttccaggcgatgcctttcccgccgttgccgatggtttccagcagcgggccgatcgaggtgaaacgctcgtaggtcgccgggtaatcacgctcaaccggaataatatgcggcgcggttttcccggggatgagatcgcattcgccttttttccagtctttgacatccagcggctgcgccatttccgcggcggagtcgtgctggatcggcagggtcaccacgtcggtttctttaccgaggtggcccacgcacacttcagagaatttcttcgcgatacctttatagatctcccagtcgctcttcgattcccaggctggatcaacggcggccgacagcgggtgaataaacggatgcatatccgaggtattcatgtcgtctttttcgtaccaggtggcggtcggcagcacgatgtcggagtagagacaggtgctcgacagacggaaatcgagggtcaccaccagatccagtttgccgtcgaggccgttatcccgccattcgacttcttccggcttcacgccgccctgcttgcccaggtctttgccctgaatgccgttctcggtacccagcaggtacttgagcatgtattcatggcctttaccggaggagcccagcaggttggaacgccagataaacaggttacgcgggtggtttttgccattttccggctgctcggccgcaaagcgaatcgagccctctttcagcgacttcacggtgtaatccaccggggtcatgccggcttttttcgcttcgtcagcgatacgcagcgggttgacgccaagctgcggcgccgacggcagccagcccatccgctctgcgcgcacgttaaagtcgatcaggtggccgctgtaacgggatttatccgccatcggcgacagcagttcctgcgcggtcaccgtttcatagcgccactggctggagtggttatagaagtacgaggtactattcatgtgacgtgccggacgctgccagtcaagggcgaacgccagcggctgccagccggtctgcggacgcagtttttcctggcccacatagtgcgcccaaccgccgccgctctgaccgacgcagccgcagaagatcagcatattgatcaggccgcggtagttcatgtcgaggtggaaccagtggttgaggcccgccccgacgataatcatcgaacgaccgtgagttttatcggcgttatcggcaaattcacgggcggtacggatgatatgcgcgcgggagacgccggtgatcttctccgcccacgccggggtgtaggctttcacttcatcgtagccggcggcgcagttgtcatcgttcagaccgcgctccaggccgtagttagccatggtcaggtcatacacggtggtgaccagggcggtagagccgtcggccagctgcaggcgtttggccggcagtttgtgcagcagaatgttttccagatcgactttgttaaagtgctcagacccttcgccgccgaagtacgggaagccgacgttcgccacttcatcatggctgcccagcaggctcagacgtagctcaatctcttcgccagttttaccgtcgcgctgttcgaggttccatttgcctttgtcgccccagcggaatccgagggaaccgttcggtacggtcatgtcgcccttctcgtcaaaggcgacggttttccattccggattattctcctgaccaagggaatccacgaggtcggatgcgcgcagcgtacggccggcggcataataaccgtcgcgctcctcgagcatcaccagcatcggcatgtcggtatagcggcgcacatagtcggtgaaatactggctcggcttatcgaggtggaattcacgcagcatcacatggcccatcgccagcgccatcgcggcatcggtaccctgcttcggcgccagccacagatcgcagagtttggcgatttcggcgtagtccggagtgatggctacggttttggtccctttatagcggacttcggtaaagaagtgcgcatccggggtgcgggtctgcggcacgttggagccccaggcgatgatatagctggagttataccagtcggcggattccggcacatcggtctgctcgccccaggtcatcggcgaagccggcggcaggtcgcagtaccagtcgtagaagctcaggcaggtgccgccgatcagcgacagataacgggcgccggacgcgtaggagaccatcgacatcgccgggatcggcgagaagccagccacgcggtccggaccgtaggttttgacggtatagacgttggaggcggcaatcagctcattcacttcctgccaggaggaacgtacaaaaccgccgcgaccgcgggcctgtttgaagcttttagctttgtcggcgtcttcgataatcgacgcccatgcctcaaccggatcgctatgctgaactttcgcttcccgccacatcttcatcaggcgtttacgcatcagcgggtatttcaggcggttagcgctgtacagataccaggagtagctggcgccgcgcgggcaaccgcgtggttcgtggttcggcaggtccgggcgggtgcgcggatagtcagtctgctgcgtttcccaggtcaccagaccgtttttgacataaatcttccagctgcatgagccggtgcagttgacaccgtgagtggaacgcacaattttgtcatgctgccaacgttgacggtatccatcctcccagtcccggttggtgtttagaagctggccgtgcccatcggcaaaggtttcacccttctgtttgaagtagcgaaaccggtccaggaatttactcatcgggtttctcctgatatggagcctgacggctctctgataaatcgacattgctggatttgcagcgaaggtaacgctatgaaagagggcgagaattgatagcgatcaatccgaactgtcttgttactgcgcagcaaaacctcgattaccaccaaggtggtataagatgttattttttaacttgttgttttttaatggttttcacctcaaaaagcggcgcctcaccgggatttgttaacaacggaggtattaaggggtagagccatttcactggcaagcccacctgttctggctcagcggtcgatgcggacaatattctcccatagtatgttgtaactaattgagcggttaaaaaaggcgcctccgtggggagcgcgcctttttatacgccaacgttaccgcggccgattactgacgcttacgaccgtataccgcccaggtgatcaccacgcaggcaatatagaacacgaggaacactttcatcgccccggccggcgagccggtcagatccagcgagataccgaacgctttcggaataaagaagccgccgatagcgccaatggcggagataaagcccagcgccgccgcggtatcggtcgccgcctcgcgcatcgcctgcgcttcgctgccgccctgggccttcacgcggtccatagtcagcttacggaagatcacggagatcatctggaaggtggaggcgctccccagcccggcggtcaggaacagcaccataaacaccgcgaagaaggcgataaagttaccgccctggccgttggtcggcagggtcaggaacagcagcgcgcagaagacagccatcaccacaaagttgaccagcgttacgcgggtcccaccgaggcggtcggagatcgccccgcccatcgaacgcgccagcgcgccaatgaacgggccgaagaaggcgtaatgcaggatctgcacatccgggaactgagtttttgacagcatcgcgaacccggcggaaaagccgataaaggagccgaaggtcgcgagatagagcagcgccataatccacagatgcaggcgcttaagtaccggcaactgctcgctcagcgacgctttcgaagccgacaggtcgttcataaagaaccacgccgccagagtgaaaataatcaggaaaggtacccagatccacgcggcgttttccagatacagcatcgagccgtccggttgctcgctaccgttaccgccaaaaacggcaaagatagagatcgagaccaccagcggcgcgaccagctgcatcacgctgacgcccatattgccaagtccgccgttaacgccgagcgccccgccctgcttcgctttcgggaagaagaagctgatgttggccatactggaggcaaagttggctccggcgaagccgcacagcagagagataatcacgaagatgctaaacggcgtagaggtatcctggaccgcgaagcccagccagacgcatggcacaatcatgatcccggtgctgaacgccgtccagcgacggccgccgaacagcggcaccataaaggcgtaaggcacgcgtaataaggcgcctgacagcgccggcagcgcggtcagcataaacagctgatcggttgtaaactgaaagcctactttgttgaggttaacggcaaccgcgctgaacaacatccaaacgcagaacgccagtaacagacagggaacggagatccataaattgcggcttgccacacgatggccgcgctgttgccagaattcaggatcttcaggccgccagtcggttatgaccgagcggttagccttctccgggagggaagattgactcatagatacctctgattattcatatttcctgccgctaccttaggggttacccggggcggtaagttgatataaatcaaaggaaaagcgcgagctaatttgtgcaaaaataaaccatgcctccaagtgagtagagaatggtggggaaaaaagtgtggtttttcacgctgctgccgggttgcgtataatcccccccctaacatcgcctaccaccgacaattaaggagtaactctttgggggtatgggtatactccaggggatagtcgagaataagcgccactcccggagacatgaccggtcaggagccacgcattccatgttaaaacgtctttttaccccgctgacgctggtcaatcaactggcgttaatcgtgctgctcgccacgattattggcgtcgccggcatggcgatctccgcgcgcctggtgaacggcgtgcagggcagcgcgcacgccattaacaaggccggttcattgcgtatgcaaagctaccggctgctggcggcgatcccgctgaatgaaaacgatcaaaaactggtggcggacatgaccgccaccgtcttcagcccggagctgcaaaattccgcccgccgcgacggccaggaaatccagcttaaagccctgcagcagtactggcagctggcgctggcccccggcatgcagcgcgcagtcaatcaggcggaagtggcccaggatgtcgccgactttgtcgatcgtatcgaccagttggtcaccgcattcgaccacaccaccgagcagcgtatcgaacgggtggtctggatccatcgcatcctcgccattggtatggcgctgctgctgatcttcactatcatctggctacgcgcccgtctgctgcggccgtggaaacagctgctgagcatggcgcgcgcggtgagtcagcgtgatttcacccagcgggcgcacatcagcggccgcaacgaaatggcgaccctgggcatggcgctgaataacatgtcggaagagctggcggaaagctacgccgtgctcgagcggcgggtgcaggagaagactgccggactggagcagaagaacgagatcctcgctttcttatggcaggccaaccgccggctgcactccagcgccccgctctgcgaacgtatttcgccggtactgaatggcctgcaggggctgacgctgctgcgcgatatcgaggtacgggtttacgacctggaagacgaagataatcaccaggagtttacctgccactcggatgatgactgtgatgataaaggctgctacctctgtccacgcaatctgccgccgctgccggatgggggaacaacgctgaagtggcggctgtcagatgcgcatagtcagtacggcatcctgctggcgacgctgccggttggccgccatctcagccacgatcagcagcagctggtggataccctggtggaacagctgaccagcaccctggcgctggaccgccatcaggagaagcagcagcagctgatcgtcatggaagaacgggccactatcgcccgcgagctgcacgactccatcgcccagtcgctatcctgtatgaagatgcaggttagctgtctgcagatgcaaggcgacgccttgccgacggaaagccgccagctgctggggcagatccgtaacgaactgaatacctcgtgggcccagctgcgggagctgttaaccaccttccgcctgcagttgaccgagccggggctgcgcccggcgctggagtccagctgtcaggagtacagcgcccacttcggctttacggtgcagcttgattaccagctcccgccgcgctttgtgccctcgcatcaggcgatccacctgctgcagatcgctcgcgaagcgttgagcaacgctctgaagcatgccagcgcgaccgaagtgaccgtgacggtgtcacaacgcgataatcaggttcgtctggtggtagcggataacggccgcggcgtaccggaccacgccgaacggagtaaccattacggtttaattattatgcgggatcgcgcccagagcttgcgcggtgactgtcaggtacgacgccgggaaaccggtggaaccgaagtgatcgtcacgtttatcccggaaaaaacgttttccatccaataaggagaccctcatgagtcaacaggaacgggcaactatccttctcattgacgaccatccgatgctgcgcaccggcgtgaaacagttgatcagcatggcgccggacatccaggtgattggcgaggccagcaatggcgcgcaaggtattgagctggccgagtcgctggatcctgacctgatcctgctggaccttaatatgccgggcatgaacggtctggagacgctggataagctgcgtgagaaatccctttctggccgggtagtggtcttcagcgtctccaaccatgaagaggacgttgtcaccgccctgaagcgcggcgccgatggctatttgctgaaggacatggaaccggaagatctgctgaaagcgctgcagcaggcggccgccggagagatggtattaagcgaagcgttaacgccggtgctggccgccagcctgcgcgccaaccgcgccacctccgatcgggacatcagccagctgaccccgcgcgagcgcgacattctcaagctgatagcccagggactgccgaacaaaatgatcgcccgtcgcctggatatcaccgaaagcaccgtcaaagtacacgtaaaacacatgctgaagaaaatgaagctcaaatcccgcgtggaagcggcggtgtgggtccaccaggagcgaatcttctaaggcgagtccgtccaggagacgcctggcgtggtaaacttgaccagcggctcggtcagcgccagggcgatctcattggaggagacgcgctgcccctgtttatcctccaccaccaccgacaggcgccagcggttcgcggcgcccggttcactgttccacaccggcataatgatgctccagccatcggggctgctggcatctaccggcggcgtcaggctgagggcctgggtgtctccctgccagtgcagcgccttgatgccatgcagactatggatctgcagcttcaactgcaccgtctccccggactgcagatcccagggcggcgtggccagatagaccgtcagatttttgcgctgacgatactccaccaccggcagattatcccgctccggactatcgaagcggctcccgcgcagcgagttgctgatcgccacctcgtctgccgcaagctgctgcttaaggggtacgccaaagcggtagtttagcttcaggcccacattgttctggctgacgccattttccccctgcttatgcttagcggtcaccgtgaccagcgggaccggggtgtaattgagcccaacggagacggccaccggattatggtagccggtgccggagtgaaacagatcgacgctatcgccgaaatattgttcgacgctgacgctggtgttgatgtgctggtagaacggcagccgcgcctgggcggtgacgtcataccctgcggccatccgttgctcctgagtctgattatcgcgtagctgccagtcgcccagcggatggtaatagtttgccgacaggcggagatattctccccacgcttcggcgccaacgctgccgcgcgccaggctttcgctcagcactttatcgtaaaacgagttatagcccagcagccaaccgccgacccgccaacgctggccaagcccgatgttgcccaccagatcgtgctcgcgccgggtcaccgagtactggttccaggtcaggtaacggtcgttatcctgcaacggcacgaaccagctccctttactgccggtgaatttcccctctttatcgaccagcaggtcgacattggcgttgccccacggcgagagccaactctccagctgatgactcacttcattgccgattttactgatggcaaacagctgcgcctgttcacccgccgtcagaccattgtcgctcatgctggcctcgccaaacttcttcgccacttcggcaaagtgccgggcgtcgtcatcaacctggggagcaatccccatatcgggcagcggatcttgcgcttgcgcagggcgggtggtgtcgctggcggtcagcgcccagacgggaacgcccggcaacagcaggagaaaggtcaacgttggcaacaaacggaacgacacaggcattaacagagtttgcgcaagctcacaaaaatggatagaagtgttagtttatcgttttttccctgctcccgcagccctgtgggcaattccaggaataagctgaaaccggttgggtaaggtgccgcccaaccggaggcgtcgctgcgcgccaccgttacgcccgggttcgttgcgccgccagcagcgcgttgagctccggcacgcaagagccgcagttggtcccgcatttcagcttcccacccagcgccccgacgctggcgcagccgctggcgatggcctcgttaattgaccattcccccaccccaaagcagctgcagacgatccgcccccgcggcgcgactgcggcgcccggtcggccgctaagcaaggcatgtcgttgggcagcatcggacggcggcgcggcaaaggcagcgcttatccatgcgcaatccaccgccggctcgcgcgcatcgctccaccagccgagcatcagccttccctgatgccaggccagcaggttccacaccgcgccgccgtcagccacctgtaactgccagccgcgccgggcgcaccacgcgctgagccactgtcgggcagatgcctccccggccagcgagtagtgcagcacgcctggcgtcgcccgccgccgccagtgccaggccgcaggaaatggtagcggttcgcggcaaaaaagctcgctgtgccaggccggttgccaggcggcgatcgccaccgccgcctgtttactttccggctggccggaatacgggtccgtgacggcggccagcaggttattcacccgcccctgacgggcaaactggttgttccagtgcatcggaacaaacagcgagccggggcgctgcccttcgctgatcgccactttcgccaccatcaccccatgccgcgaccagatccgcgccagcccgtcagcgggaagctgatagcgaacggcatcctgcggcgccacctccaccattggctccgcgatatgctgcatcagccgcggcactgcgccggtacgggtcatggtgtgccactgatcgcggatccgcccgctgttgaggatcagcggataaaaggcatcggttgtcgcccgggtcggttgaggcgtcaccggcaccatccgcagcctgccatcgccatgccagccgcgcgtgatatcccaggcgacctcgctgcggctgaccggccagcgcaccggcggcatggcgtcccacgcctcacggctgagatccgccagcgcgccgatatcaaacgcccgctggccgtcgttttcgaaaccggacagcgccgcatgctcgcggaagacgtcatgcggatgctgccaggcaaacgcctcgcgataccccagcgcctggcccactctggcgatgatccaccagtccgctttcgcctcccccggcggcggcagaaagctgcgctgacgggatatccgccgctccgagttggtgaccgtgccattcttctcgccccaggccagcgccggaaagcggatgtgggcgaaacgtccggtatcggtctgggcggcgacatccgagacgatcaccagcggacaggcggccagcgcctggctcaccgcgtggctgtcagggagcgacaccaccgggttggtacccatgatccagaccgctttgacctcgccgcggccaatggcggcaaacagctccacggcggtcagcccgggggtctgcgccagccgttccgtcccccagaagcgggccagccgctgcagatcgtctggcacaaaatccatgtgcgccgccagcatcgtcgccagcccgccgacttcgcggccgcccatggcgttgggttgaccggtcagcgaaaaggggccgcagccgcggcggccatacttcccgctggccagatggacgttgatgatggcgttacatttgtcgctgccgctggcggattgattgattcccatggtgtagagggtgatcgcccgcggggcggcgatgaactcgcgatagaatcccgccacctcatcggcaggcagaccgcaaaaggccgccaccctcgccacgtcccagccgcgggcggcggccagcgcctgcgggccgtcgcgaaagccatcgacgcaggctcctgcctcagccagggcgttaagcagccccgcaaacaacccgccgtcgcttcccggggccagcgccagatggcggtcggcgatctcgcaggtagcggtgcgtcgggggtcgatcgccacgatccgcaatcggggattatcccgcttcgcctgcgccagccgctggaacagcaccggatgcgcccaggcggcgttcgagccgaccagcaccaccagatcgctgttttccacatcatcgtagctgcagggcaccacgtcggcgccaaaggcccgcttgtagccagtgaccgctgacgacatgcacagccgtgaattggtatcgatgttcgccgcgccgataaaccctttcatcagcttattggcggcatagtaatcctcggttaacagctggccggaggcgtaaaaggccaccgcttgcggtccgtgctggtcgataatctgtctcaggcgcgcagcggtttccgccagcgcctgaggccaggctacctgctggccgtcgacctccggcgtcagcagccgccccgccaggcccgtggtctcccctaaggcggcccctttgacgcacagacggccgaggttcgccgggtgctgatcgtcgccacgcacgctcacctgccccgcgtcgtccacgctcgccagcaccccgcagcctacgccgcagtaggggcaggtcgttcggatggtcttcatcaggaggcctccgcgcgggccagcagctgctggttgcccacccacactttgccgttttctactttcaccggccaggcgcgtaccgcctgttcgtcgccgtcgcacggccagccgtcgcgcaggcgtatccgctgtttgtacagcggggagatcaccaccggctcgccgccgacgtcccctaacagcccacgcgacagcacgttggccgcgctgcccggctcgcggttgtcgagggcgtagacccgctcgccgaagcggaacagggcaatctgccgctcccctaagcgggcgccgatccccgcctgcgccggaatggcgtcaagatcgcataccgcctgccacggtcgggatgggagttcgccttcgggcaacgtctcagtcagcagcggctgcggctgaccgcgcagatcgcggcgctgcacagcctcgtcgggctggtcgctattaacgaaggagcggaacagcgccagacgctgcggatcgttgagggtggtctgccactcgcactggtagctgtcgacgatccgggccatctcctgctccagctcctcgccaatgccaagactatcttccagcaccacctgccgcagataggcgacgccgccctccaggttatccatccaggtgctggttcgctgcaggcgatcggcggtacggatatagaacatcagcagacgatcgatgctgcggatcagcgtcgcttcgtcgagatcgctggcaaacaggtcggcgtgacgcggtttcatcccgccgttgccgcagacgtacagattccagcctttgtcggtggcaatcaccccgatatctttcccctgggcttcagcgcattcgcgggtgcatccggagaccgccatcttgattttgtgcggggcgcgtagccctttatagcgatgctcgagccgtaccgcgagcccggtggagtcttgcacgccgtagcgacaccaggttgagccgacgcaggatttcaccgtgcgcagcgacttgccgtaggcgtggccggtttcaaacccggcgtcggccagctcgcgccagatagccggcagctgttccagccgcgcgccaaacaggtcgatgcgctggccgccggtcactttgctgtagagctggtaacgtttggcgatctgcccgatggcgatcagtccgtccggcgtcacttcccctgccgccatccgcggcaccaccgaatagctcccgtccttctggatattggcgaaatagcggtcgttggtatcctgcagcggcaggtgcgccggcttcagcaggtactcgttccagcaggaggccagcaccgaggccaccagcggtttgcagacatcgcagccgtgcccctggccgtagcggctaatcaactgctcgaaggtatggatatggttaacccgcaccaggtggtagatctcctggcgcgaccacgggaaatgttcgcagacgtcttttttcacttcgacgccctgctccgccagctgatactccatcacctgtttcaccagcgcgctgcagccgccgcagccggtagccgctctggtgcagctttttatcgccgacatatccctcgccccattgttcaccgcctggcagatatcgcctttgctgacgttatggcaggagcagatcggcgcgctgtccggcagcgccgcgacgccgagcgccttcggcgcggctccctccagcgcgggcaggatcagactctccggacgcggcggcagcgccatgccgttcagcatcatctgcagcagcgtggcatagtcgctggcatcccccaccagcacgccgccaagcagggctttgccgtcctgactgacgacgatttttttgtaaatctgctgcggaccgtcggtccattgatagctctgacagcccggcgtgcgcccctgcgcatcgccaaacgaggccacgtcgactcccagcagcttcagtttggtgctcatgtcggcgccgctaaagcaggcgtcctctcctgcgagagtggccgcggcgatgcgcgccatctgatagcccggcgccaccagaccgtaaattttattgtcccacagggcgcattcgcctatcgccagcacgtccgggtcagaggtgcggcactggccgtcgatgtgaattcccccgcgttcgcccacctgcagcgcgcagccgcgggccagcgcgtcctgcgggcggatccccgccgagaagaccaccatgtcggtccgcaacgcgccgccgtcggcaaagttcagccgcaggccgtcggcctcgcgcacgatggcggtggtcgctttgctggtatgcacccccacgccgagggcgacgatcttctcccggagcatcgccgccccgccgttatccagctggacggccatcaggttcggggcaaactccaccacctgcgtctccagccccagctgtttcagggcgttggccgcctccagcccgagcagcccgccgccgataaccaccccgctcttcgccgcggcggcatgggcggcgatacggtcgagatcgtcaagagtgcggtagacaaaacaccccgcgagatcgttaccggggattggcggaacaaagggatacgagccggtcgccagcaccagtttatcccagtggatttcatgcccctcggcgtcccgtaccagccgtgcttcgcggtcgatggtcgccaccgcctcgccgaggcggagttcaataccatgttcaataaagaagtccccggccgccagcgacagcgactcggcgctgcgtccggcaaaatactcggagagatgtacccggtcgtaggcgggataacgctcttcgccaaacaccacgattcgatattgctgatgcagattgcggctcacgcattgctcgagaaaatggtggccgaccatgccatgtcccaccagcactaatacaggtttcgtcatcgtcattattcctgcagcctgcggctgcgttgaagaggggtcaaaaagccagtccacggtggcaggctcatcgctttccaggcgcgcggtgagcgcggcggcggcggtgcagtcgcccatcagcagcacgccgcgcaggcggccatcgcgcagcagcaggcggcgatagtggcggtcgatggggtcccagctggtataaatgtcatcctgttcgccggcctgctgctcgccagcgcaaaagaattcaatgccggtgaccttcaggcgggtcccggcgtcctgccagacaaagccctcgccgggggcgccgcacaggcgatccgccagcacctcggcctgacgcaggcagggagccaccagcccccaggtctggccgtcaatttcgcaacattcgccgatggcgctgatccccggcagcgaggaggccatctgacggtcgaccacgatcccccgctggcacagcacgccggactgcgccgccagacggctgtcgggctgcacgccggtagccagcaccactctggcggcgcggaatacgcgcccgtccgccagccgcacgccatcggcgtcgatggcggcgatgctgcactccagcacgcagcgaatgccgcgcgcttcaagctgctgcctgagctcatcggcggcaaaagcgtcggtcagcggcgccattaatccgctgccgcgatgcagaagagtgacctctccgccgtgacgacgcagcgccgccgccgcttccacccccagcaccccaccgccaatcaccaccgccgggccgggtatcgccagaatacgttccacgtccgccagggtgcggaagggcataacctgcggacgatcaatgcccggcagcggcgggataaagggccgcgaaccggtggcgaacaccagctcatcccacggcagccaggtttccgcgatgcgcagccgccgttgctgaatatcgacttcatcgaccgcctcgccagaccgcaggcacaccccgtgccgggtgtaccactccgccggcagcaacgggatctgcgccgccgttttttcacctgccagcagcggcgagagctgaatgcggttataggccgggtgcggctcgtcgccgacgacggtaatggcaaaccgcgcggggtcgcgctcaaccagccgctgcaccagccgggtggccgccatgccgttaccgatcaccaccagtcgccgcgtcatgaccgcctccttacgccgctttcggctgtttttcatacaggaaatggaggatctgctggcgcagatggtgataccggctgtcgtccgccagctgaacgcggtggcgcggacgcggcagatcgaccgagaggatctcgccgaccgtcgccgccggaccgttggtcatcatcagcacccgatccgagagcagcaccgcttcatcaacgtcgtgggtgatcatgacgatggtggtattgagctcctgctggatatgcatcaccgtgtcctggaggtgggcgcgggtcagcgcgtccagggcgccgaagggctcatcaagcagcagcactttcggcttcatcgccagcgcccgggcgatacccacccgctgcttcatgccgccggagatctccccgggacgtttgtgcagcgcatgacccatctgtacgcgcgccaggttgtgttcgatccactcccggcgctcactcttgctcatggtgcgacggaacacctgatccaccgccagcgccacattgtcgaaacagctcagccacggcagcagcgagtggttctggaaaaccaccgcccgctccggcccgggaccggcgatttcccggttatcacacagtagtccgccctcggtaggggtggtgatcccggcgatcaggttcagcagggtcgattttccgcaacccgagtggccgataaggctaatggtctccccttcgacgatatcgaaggagacattctgcagcgccaggaactcgccgctggcggtgttgaagcgttggctgacggcctgcacctgaattaatggtttcatgttggctccttatttttcctgccagctaaagcggcgagcgagcagcatcaggccctgctccagcagcaggccgacgacgccgataatgacgatggcgatgatgatgttttccacattgaggttgttccactcgttccagatccagaagccgatccccagcccgccggtaagcatttccgccgccacgatcaccagccaggcgatgccgatggagaggcgcacgccggtaagcaccgccggcagcaccgccggaaagaggattttgcgcatcaccgtccactccgagagctggaggacgcgggcgacgttgagatagtcctgcgggatccgccgcacaccctccgcggtgttgatcaccatcggccagatggagcagataaaaatggtccagctggaagccggctccgccttctggaacagcagcaggccaatcggcagccaggctagcgggctgaccgggcgcagcagagcaatcagcggattaaacatgcgggcgaagaacagcgaacggccgatcaaaaaccccagcggaatgcccgccagcgccgccaggccgaagcccaccgccacgcgctgcagggaggccagcacgttccagccgatgcccatgtcattgggcccgtcctgatagaacggatcggcaaacagggtcagcgccgagtccagcgtgctcagcggcgtgggaaagcctttgctatgcatcgccgccagctgccaggccagcagcagcactcccagccccaacagcgggggcagcaggcgctgggtgagctcacgcagccagcgcgtgacggtcggcgtggtgcgccggacctgcaccggcggcaggataatcacttcgccaggtgcgttgtccacgctgacgaccggttgcttacgttgtgcctgcttcatctcatgcccccttacgttgaatagagaaatggcgggcgtagccttccgggtcggacccgttccagaccgtcccgtccattagtgtgctgctgcgcatcctggctgccggcgcgctgatccctcctaccgcctgggcggcagcctgccagacatcgatgcggttaatgcgcgacgccaccgcgaggtaatccggagcctgcttcagcaacccccagcggcggaactgggtgaggaaccacatcccgtccgacagccacgggaaactcacctcgcccccggcccagaagcgcatcggatgggcatcctgccagcggcggccaaggccgttgtcatactctccaagcatccggccggtgaggtattgctccttggtattgagccagccgcgtctggcgagcaggcgggccgtctcccgggtgttctccggcgaggcggcgatccagcgctgcgcctccatcagggccgccaccagcgcgcgggcggtgttcgggttgcgttccacccagtcgcgacgggtgcccagcaccttttccggatgctcgggccagatatcctgggaagtggccgcggtgaagccgatacggtcgttaatagcgcgggcgttccacggctcgccgacacaaaagccgctcatattgccgatgcgcatgttcatcaccatctgcggcggcggcaccacgacggtgcgcacatcgttgaagggatcgatgccggcgctcgccagccagtagtaaagccacatggcatgggtgccggtaggaaaggtatgggcgaaggtgtaactgcccggcgcgctgcggtcgatcagccgcttcagcccgccgaggtcggtcacccctttctcctgcagctcgctggagagggtaatcgcctggccattgcggttgagggtcatcagattggccatcgcctgcggcttgctggcgatccccagttcgaggccgtacagcaggccatagagaatatgcgccgcgtccagctcgccggccaccagcttgtcgcgcaccgccgcccagctggcttccttactcgccaccagggtgatgccatatttttggtcaaaccccttcgccgcggcgatggccagcggcgcgcaatcggtcagcggaataaatccgacccgcacgcgggtttgctccggtttgtccgagccgccggcccaggcggcctgcatcacgcccggcagcagcatcgcgccgcccagcgcggcccctgcctgcagcaagcgccgccgggaaattgaaaatttgtcgcccatatccgctccaccatgcgcaaaaaaaaaagcgcccgacagtgcatacgcactgcaggacgcctttatccacggacacccgaaccgccattggttcgttgcccggacttttattcacttaataagtaatgcaaacgggatgccagctttggcaatagcgcgctggcgggctttttcccaacgctggccggtttttcacctaaaagtgcaccgccggcaggcaaagaatgcccatcgattgtgcatctactcctttggtgttagcggccaaatcgccttcaccatcagcagcgcgcgggctatctcaaccatgcgctgatttttgtccatggccatcttgcgcagcgtctgccaggcctgctcctcctgcattccctggtgcgtcatcagcagacttttcgctttttcgatcagcttgcgctcttcgagcgcgtctttcagcgaggccagctggctggagagctgctgcagctcataggcctgctggcgcaccagcggcagtagctgtttatcgagccgtggcgtcacgctatcgtcttcctctccggcctgccagccaggcgcgtcgtctgctaacagcgcgtcggtggcatccagcagatcgtcgatcagttgctcttccacttcgcgcagttgctcaagccgttgggtttgcagaccaaaccagcgcagcgccgtttccccgccgtcggcagccggctggcgggtacaggcgatccgccgcagctgttcaatatccagaccggcgtggcactgggttctgaacaactggacggtcgccgggctgcccagcgcctgaaagctgtcgaagcagggctgctgaccgtcaatacggtccaccagctgctggcgcaggctgtcgctgaactcgccgcgggtaaagcccaatgctcccagcgcgcgctcctggcccaccagctcttttccctgcataaagctgtacagggcgaccatccgaccagccaccggcggatcgtcaatgctgtcattgagctgcggggcgatgttcagcagatggcggatgacgcggctgaactgctccgtcgcggcttcagcggcaatttgccggcggccgatctgcgcgcgtagtgccgggagctgcgccagctcgtcaagcgctctggcgatacgccagcacagcgcgctgccggctaccgcgcgcgcccgttcgaggctggcataaaacagggctagccgctcgtcaaccagcgcccctcccgcccgacactccgctgtatacagcaagccgcccgagcaaagatagatattcgacgccccgcgctcacactgcagcatatgcaccagcgcgctgagctggctggccagttcccccagttggctaagctgctgaagctgttgtttttgcaggcgacgcgccagctgcagccaggccgtcgcatcgtgcgcatgaccagtcgtattattcatacccctcctccgggttaacgctttatactgcctaaagcaataaccgtgcctttaagaaggagtttgtatgcaacgtattgtgatcatcgccaacggcgccgcctacggcagcgaatccctgttcaacagcctgcgcctggccattgccctgcgcgagcagcagtccgacctcgatctcaagctgtttctgatgtccgacgccgtcaccgccgggctgcgggggcagaagccggcagaagggtataatgtgcagcagatgctggagatcctcaccgcccagcaggttcccgtgaagctgtgtaaaacctgcgcggacggccgcggggtcagcgcactgccgctggttgacggcgtggaggttggcactctcgttgagctggcccagtggaccctggcggcagataaagtgctgaccttctgaatctggggcgccaaacggcaggaaatatcaggtttcgccgcctgcagaggtaaaaaaaacgttagctgaatgctttcaggaacaacgtcatttttgtttaatctttatccctttttttgatcaaaatcagcatcccgacccgcgccgtttggtgtgatgcacagagcaaagtgtgaacaatatcacgcgaggactgggtgggcaggatgctgtagcgggacagaaacggggtataaaatggcgatggttaaagcaagtttgacgttatttggtggtgacacgctggtggtgcggtgctcagagcgctgccatattcatctgatgagcgcgaaggtcccgggcgacagtcatgcggatattctgagcgtgcaggatcgggacagcgcgtatctgacggtgccctacagcggcacctggaacgtgcttatcgacagtcacagccagtcgctggagcactccatcagctacgtgccggcctgaccgtcactgccagaacacacgcccggtcatgccgggcgtgagattcatgacaaacctcatgcaatcattgtacttgcagattgcaccagaaaaataacaaggaaaatcaatttattgattttcggctgataaccaccagtaaggaaaaatcacgctttttccttactggtcagcaatcggacgcccagtcatgccgggcgttttcttttgcgcgcgctcaggccaggcccggcgtcggactctcgcccaacagcgcgcggacgctggccaccaggtcatcgagactggcatcgtgcatgcccagcttgcgcagcgcctgctcaagcgaaaacagatactgggcgttggtgccgagcggcccgctggcccgggcgatcagcggggcgataacctgggcactggtatccggttcaaacagtggatggcgcggatccataataaacaccagggcattcaccgtccgtccgtcgtccagctccagcttgcaccaggtgggcagatagcagccggtgatcatctcccgcttccacagcagggtcagctcctcctccagcgtgtcgtcaggcagacgataggcgacgccggtggttcggccgccctctttgagagccagcatgcgtcccggctggcaggcactaccgcgcccggcggtcaaccgcaggcaaaacgcgcggtgccagcccggcagcgtgccggtgcaggactcgcgataattgagcgccgggttccagataagcgaaccgtagccaaagatccatactgagccatcatccgggcggcaggccagcgtcgccgccagcgaggctgcacgttgttctgccgaccagagtagcgattcctcaatagcgccaaacgctgtcttacaatccgcattcattaagaaatcacgagttaacactgtttactacctccgccactgcccgcttcccggcgttcgtctcatgcatccgtcaatattgctgaaatattatccagctttatctttcaataagcaatcagcggggcgctggcaagcgaaaaagcggcgtcagcgattattttttcttatgccacttatcatcatcgcctttctcatagctgttcttcaccgccgcccaggcgactttgtgcgccgtctcttcgcggctggcgtcatcgcgccgctcgtctttatctttatattgatcccaggcgctgttaaacgcttctttataaatttcctgcgcatgggcaggcagtacatgctgaacgctgtcggggagttcttgtttactgcgatagggcatactgacctcctgtttgagcattaagtttaagcctggtacgcattcggctggctatcaaggtcaaaatgagtagaaaaattattttagtaattatttgaataataagaactaaatataagtaaacataaattataataaactaatcaagatatccatcgatacccgtaaatttaagtaaaaaaccagcggtaatttagcaagatctgttactttaccgccctacgtttttataattataacacctgcataaatggagatggttcatgacccatgcacatgaggcggtaaaaacccgccataaggagtcttccctcgtctttccggtgctggcgctggcggtgctgtttttctggggcagcagccagtcactgccagtggttatcgcgatcaatatcctcgcgctggtcggcattttgagcagcgccttcagcgtggtccgccacgccgacgtcctcgcccaccgcctgggcgaaccctatggctccctgattttaagcctgtcggtggttatccttgaggtcagtttgatctctgccttaatggccaccggcgacgccgcgccgaccttgatgcgggataccctctactccattattatgatcgtcaccggcggtctggtcggtttctctctgctgctgggcgggcgtaaattcgccacccaatatatgaatctgttcggcattaagcagtatcttatcgccctgtttccgctagcgattatcgtgctggtctttccgatggcgctgccgggcgcgaacttcagcaccgggcaatcgctgctggtggcggtaatttcggcggccatgtacggcgttttcctgcttattcagaccaaaacccatcagagcctgtttgtttatgagcatgaagacgacagcgacgatgacgacccgcaccacggtaaaccgtccgcccacagcagcgggtggcataccgcctggctgctggtgcacctggtggcagtgatcgcggttaccaaaatgaacgctaacccgctggaaacgctgttgaccagcatgaatgccccggtggcctttaccggcttcctggtggctctgctgatcctgtcgccggaaggccttggcgccctgaaagcggtgctcaacaatcaggtacagcgggcgatgaatctgtttttcggctctgtgctggccaccatctcgctgacggtcccggtggtcaccctcatcgccttcctgaccggcaatgagctgcgctttggccttggcgccccggagatggtggtgatggtcgcctcgctggtgctgtgccatatctccttctccaccggacgcaccaatgtgctgaacggcgcggcccacatggcgctgttcgccgcctatctgatgaccattttcgcctgaccccgttttcccacccggcggagtccgggcgaaaaaaagcctgccggttttgacgccggcaggcttttttactgatgcagtcaggcttacttgctggtatccagctcgtcgaagcttttcaccagatcgtcaatcgctttcatctgtttgaggaacggctccagtttatccagcggcagcgcggacgggccgtcgcatttcgcgtggtccggatccggatgcgcttcaataaacagaccggcgatacctaccgccataccggcgcgggccagctcgctcacctgcgcacgacgaccgccggaggctgcgccaaacgggtcgcggcactgcagcgcgtgggtgacgtcgaaaatgaccggcgagttgttggaggctttcttcatcacgccgaagccaagcatatccacgaccaggttgtcgtaaccgaagttcgcgccgcggtcgcagaggattactttgtcgttacccccttcgataaacttatcgacgatgttgcccatctgacccgggctgacgaactgcggcttcttgacgttgatcaccgccccggtcttcgccatcgcttccaccaggtcagtctggcgcgcgaggaaagccggaagctggatcacgtccaccacgtcagctaccggctgcgcctggctggcttcatgaacgtcggtgatgattttcacgccaaaggtctgcttcagctcctggaaaatcttcatcccttcttccagacccggcccacgataggagtggatggaggaacggttggctttatcaaaggaggctttgaatacgtagggaataccaagcttctgcgtaacggtgacataatgttcgcagatacgcatcgccaggtcgcgcgactccagcacgttcatcccgccgaacagcacgaacggcaggtcgttcgctacgttgatatcaccaatgctaaccactttttgtttcataagttcgccttatcagggtgtaaccggaatggttccagactaatgcaatgtaatttgtttatgcgaaatcgtgttgatctgcgcgcggatcatctcgctgatcggatcctccgggcactgctcaacgaaatagctcagatccaacagcgccacgtgatcgcagtccagctgggcgtatatcagcccgcggtcgcggatctcatacggatcttccggattaaactgcagcagcgcttcgctggcgcgcagggccagctccatctgccgctcttccatcagcgccgacttcagggtgtccagcagcttgcggatcacctcggcgttatccgcttcgtcgagatcttcattaaacagttccgccaccggcccgatgttgcccttcagccatacctccagggtatgctcgtcgagggtctcgccgttaaacggattaatcagccacatctcttcgctggtttccgggtccgcacgcagcagcatctgggtcgggaagatcaccggcaccaccggcagcgccaggcgctgggcgatccacagcaggatcgcgcctaacgacaccgcgctcccctggcggttaaccagcactttatccagccatagcgcgtcggaaagacgatacacgccctgcgaggcgccaaagccccactcgtcataaaacagctccagcaatcgttctatctggcgctcctggtcccacgacggcgcaatctcctcctgcgcgaggcgcagcaatcgctgcagctcttcctcgacaaaacgcgacggaaaatcgtcgcggacctgttcagaaatgaggaccatgccatcacacaatggcgctttgttaaattcgaaatccgctaatgaccccatgacctaccccagtatcggtattcttgtgatggcgagttgaatgatgataaacaacaccaccagcgccagcaggaacgcgataaagcggctctgctggctgcgcggacgacgacggcccaacgcgataaaacctaatgcgatgtaaatgataacgccaaacagcttttcagtcagccatgcgccgtcttctgtgaacggcaggtagtgcgttatcgccattaaccctgcgccgctgagaaacagcagcgtatcgctgcagtgcggcgcaattcgcacccaccgctggttcagcagcgggctctggtgatacatccaccagtaacgtaaaacgaacaatcctaccgacaccgccactgtggcaatgtgcaggtagaggacagccgtgaataagttcatcagccaacattctccatgtcgggtaaacgtccgagggtcagacgctcattgtcgccatagtcgcgacaggtcgcgacgtccagatagcccgcttcgcggaacagcgcgcgaaccgcctcgccctgagtccagccatgctccagcagcatccaaccgccgggctgcagatactgccgtccctcgcggatgatatgcgccagatcggccagcccctggtcgcctgcgaccagcgccgtcaacggctcaaagcgcacatcgccttcggcgagatgcgggtcggcggcgtcgatataggggggattgctgacgatcgtggcgaagcgctgcccggccagcgcgctaaaccagtcgctttgacttatcgtcacgttagcgatgcccagatgttcggcattgcgcaacgccagcgccacggcgtccggcatcacgtccaccgcggtgacctcacagtccggacgttcgctggccagcgccagggcaatggcgccggtcccggtgccgaggtcgagaatacggcacggcgcggttggcagacgcgccagcgcctgctctaccagacattcggtatccgggcgggggatcagcgtcgccggggagacgaacagcggcagcgaccaaaactcgcgctgcccgaccagatgagcaataggttccccgcgctggcgtcgcaccaggagcgcctccagcctcgccgcctcgtcagcagagagcgtcgtttcaccgaaggccaaaatccaggttcgcgcccggccggtaacgtgtcccagcaagatctcggcgtcgcgtctcgggctgtcgctctccgccaggcgggcgatcgcctgctgcagccaggcctgaaaggtcatcattcctgctcggacagcgccgccagctgatcggcctgatgttcctggacaatcggctcaatcagcatgtcgagtttgccctccatcgcctcatccagacggtagagcgtcaggttgatgcggtggtcggtcacgcggccctgcgggaagttataggtgcgattgcggtcgctgcggtcgccgctgcccagcaggttgcggcgcgtggaggcttccgcctgctgacgtttggccacttcggcggcgcggatgcgcgcgcccagcaccgacagcgccttggctttgtttttatgctgagaacgctcgtcctggcactccaccacgatgccggtgggcaggtgggtaatgcggatagccgagtcggtggtgttaacgtgctgaccgcctgccccggaggaacggaaggtatcgatgcgcagatccgccgggttaatgtccggcatttcggcttccggcagctccggcatcaccgccaccgtacaggcggaggtgtggatccgcccctgcgattcggtggccggcacacgctgcacgcgatggccgccggattcaaatttcagccgaccgtaaacgccgtcgccgctgatcttggcgatcacctctttaaagccgccgtgctcaccttcgttggcgctgaggatctctacctgccagcggcgcgattctgcgtaacgggtgtacatgcggaacagatcgccggcaaacagcgctgcttcgtcgccgccggtcccggcgcgcacttccacgaaggcgttacgctcgtcatcaggatctttcggcaggaggagaacctgcagctgttgctccagctggtcgcctttttctttggcgtcacgcagctcttcctgcgccatttcgcgcatttccggatcgtcgagcatcatctgcgcggtttcaatatcctcctgcacctgacgccagtcggtatagcagcgcgccacatcgctcagttgagcatactcccgcgacagcgcgcggaatttatcctgatcggcaatcgtcgcggcatcgccgagcagcgcctgcacttcttcatggcgctcgtacaacgcttccagtttggcaacaatagaagacttcataggcgtgaattcaccctgtcctgaaaataagagaaaggtgcgctattccagcccgaggctgttgcgcagaatatgcagacgttcgtcgtccccgtcacgggcggcctgctgaagagatttggttggcgcgtggatcaggcggttagtgagcttgcgcgccagatcctgcataatttcctgggcatcaccgccctgctccagcgcggccagcgctttcgccgtcagctcctcacggacctgctcagactgagaacggtattcgcgaatggtctcgctggcgctctgcgcgcgcagccaggccataaattcgctggtttcctgctcgacgatcgattccgcctgcaccgcggcagccttacgctgcgccaggttatgctgaataatgttttgcaaatcgtcgacgctgtagaggtaggcgttagccagtttgccgacctctggttcaacgtcgcgcgggacggcgatatccaccagcagcatcggctggttacgccgcgccttaagcgcacgctccaccatgcctttgccgatgatcggcagcgggctggcggtggagctgataatgatgtcggcctctttcagccgttcgtcgatatcgctgagggctatcacctcggcgcccacttcctccgccagcgcctgggcgcgttcacgggtgcggttggcgatcaccattttgcgcacgtgatgttcgcgaagatggcgcgctaccagctcaatggtttccccggcgccgaccagtaacacggtgacgctggagagcgattcaaagatttgccgcgccagggtacaggcggcgaaagccacagagaccgcgctggcgccgatatcggtttcggtacgcacgcgcttagccactgaaaaggatttctggaacatccgctccagctcgctgacgttaagatggccgcggctggagtcggcgaaggcttttttcacctggccgaggatctgcggctcgcccagcaccagcgaatcgaggccgctggcgacgcgcatcagatggctgacggcgtcattatcctggtgccagtaaaggctttttcgcaggtcttcttcgttgaggccgtggtagttgcacagccagcggatcagcgcttcctgcaggttatcctgctcttcgacgctgagatagagttccgtgcggttgcaggtcgacagcaccaccccaccctgcaccatcggctgagccagcaagctctccagcgccttatcgagcgtttccggcgaaaacgtgacgcgttctcgcagggcgaccggagctgttttgtgattgatgccaagagctaaaagggtcattgtgagggagtagtaccagcgttgctaaggttagtctgagtgcatcatacaggatgcgcgtaatcaataaaagagaggctccccttttggagtaatagttaaagcaagaccgccattaaggttaattttttgatttcagacaacttgaacgtagacgctatcgcccggcgacgctagcattaagggttataaatgtaacctgctacacaaatcggcccgctgttccctgtcgccgtttttccctgtagacatcaaggatttgtcatcattatgaatcgactgttccgcctgctgccgctggccagcctcgtcctcaccgcctgttctcttcatacgccgcaagggcctggcaaaagcccggattcgccgcagtggcgtcagcaccagcaggctgtccgcagcctcaatcagttccagacccgcggggcgtttgcctatctttccgatgagcaaaaagtctatgcccgcttcttctggcagcaaaccggccaggaccgctatcgcctgctgctgaccaacccgctgggcagcaccgagctgtcgctgaccgcgcagccgggcagcgtgcagctgatcgataacaaaggccagacctataccgccactgatgccgaagagatgattggccgtctgaccgggatgccgatcccgttgaacagcctgcgccagtggattatcggcctgccgggcgacgccaccgactattcgctggacgatcggtaccgtctgcgtgaactgaactatacgcaaaacggcaaaacctggcacgtgacctacggcggctacaccagcgatacccagccagccctaccgtccaatgtcgagctgaacaatggcgctcagcgcatcaagctgaagatggataactggatcgtgaaatgatgacccgctggccctctcctgcaaaactgaatctgtttttatatatcaccggccagcgggccgatggttaccataccctgcaaacgctgtttcagtttctcgattacggcgatacgttgaccatcgaaccgcgtactgacggccaactgcgcctgctgacgccggtggccggcgtgcccgacgaggagaatctgatcgttcgcgccgcgcgtctgctgatgcatgccgccagcgaaagcgatcgcctgccggcgggcagcggcgccgatatcagtatcgataagcgcctgccgatgggcggcggcctgggcggtggctcctccaatgccgccaccgtgctggtggcgctcaaccatctgtggggctgcggtctctcggaagatgagctggcgactcttggccttcagctgggggccgatgtgccggttttcgtgcgcggccatgccgccttcgccgagggggtgggtgaaatactgacgccggtagaacccgaggaaaaatggtacctggtggcccacccgggggtcagtattccgacgccgatcatttttcgcgatccggagctaccacgaaataccccgcgccggtcaattaatacgttattaaattgtgaattcagcaacgattgcgagcttatcgcaagaaaacgttttcgcgaggttgatgccgcgctttcctggctgttagaatatgcgccgtcacgcctgaccggcacaggggcctgtgtgtttgctgaatttaacaccgaatccgctgcccgtcaggtgctggacactgccccggcatggctaaatggctttgtggcgcgcggagttaacctttcgccgctcaagcaggccctgctctgaatcctgcgccgtgatggcacattgataatgagtcagccggggaaattgagttacggtgacaacgtcaccctgttccagacgttgcatcgtgctctttaaatacaccgactggatcgaatggcgccatcccgcacattattggcccattcatccaccactggacgcatgcctgaggttcttctcgtgcctgatatgaagctttttgctggtaacgccaccccggaactagcacaacgtattgccaaccgcctgtacacttctcttggcgacgccgctgtaggtcgttttagcgacggcgaagtcagcgtacaaatcaatgaaaacgtacgcggtggtgatattttcatcatccagtccacttgtgctcccaccaatgacaacctgatggaactggttgttatggttgatgctctgcgtcgtgcttcggcaggtcgtatcaccgccgttatcccttacttcggttatgctcgtcaggaccgtcgtgttcgttctgctcgtgtgccaatcaccgcgaaagtggtggcggattttctgtccagcgtcggcgttgaccgcgtgctgaccgttgacctgcacgcagaacagatccagggcttcttcgatgtgccagtcgataacgtgttcggcagcccaatcctgctggaagatatgctgcagctgaacctggacaacccgattgtggtttctccggacatcggcggcgtcgtgcgtgcccgcgctatcgctaaactgctgaatgataccgatatggctatcatcgacaagcgccgtccgcgcgccaacgtctcccaggtgatgcacatcatcggcgacgttgccggtcgtgactgcgtgatggtcgacgatatgatcgacaccggcggcaccctgtgtaaagcggcagaagcgctgaaagagcgtggcgcgaaacgcgtattcgcttacgcgacgcacccaatcttctccggcaacgctatccagaacatcaagaactctgtcattgatgaatttgtcgtctgcgataccattccgctggcaccagaaattaaagcgctggataaagtgcgtactctgacgctctccggtatgctggctgaagctattcgccgtatcagcaatgaagaatctatctctgctatgttcgaacattaatcgagcccagcacaaaaacccgctgcggcgggtttttttgtctccgcaccttatttgtatgatcaatgcctccttcacctgccatttagttgacagatgatgcgctcatggatgaaacattattgtgaacagattattttcctcacatgtgatgcctttccgcgccctcatcgacgcttgttggaaagaaaagtacaccaccgcccgcttcacgcgtgacctgatcgccgggatcaccgtcgggatcattgcgattccgctggcgatggcgctggcgattggcagcggcgtgccgccgcagtacggcctctatacctcagcggtggcagggattgtgatcgccttgaccggcgggtcacgctttagcgtttccggtccgaccgccgcctttgtggtgatcctctatccggtttcccagcagtttggtctggcgggactgctggtggcaaccctgatgtcggggatctttttaatcctcttcggcctggcgcgctttggccgcctgatcgaatacatcccgctgtcagtcaccctcggcttcacctcggggatcggtatcaccatcggcaccatgcagattaaagatttcctcggcctgcagatgccccatgtgccggagcattatctgcagaaagtggcggcgctggcgatggccctaccgaccattaacgttggcgatgccgccatcggcgtcgttactcttggcattctgatcctctggccgcggctgggtatccgcctgccgggccacctcccggcgctgctgggcggctgcgcggtcatgctggtggtcaacttgctcggcggcgatgtcgcgacgatcggctcgcagttccattatcagctggcggacggcactcagggcaatggcattccgcagctgctgccgcagctggtattgccctgggatatgccgggctcaaactttaccctgagctgggcctcgctgcaggctctgctgcctgccgccttctcaatggcgatgctcggcgccattgaatctctgctgtgcgcggtggtgcttgatggcatgaccggcaccaagcacaaagccaatagcgagctgattggccaggggctgggcaacattgtcgcgccgttcttcggcgggatcactgccaccgcggcgattgcccgctcggcggcgaacgtccgcgccggcgccacatcgccggttgccgccgtgatccacgccctgctggtgatcctggcgctgctgatcctcgccccactgctctcctggctgccgctgtcggcgatggccgccctgctgctgatggtggcatggaatatgagcgaggcgcataaagtcatcaatctgctgcgccacgcgccgaaggacgacatcgtggtgatgctgatgtgcatgtcgctaacggtgctgtttgacatggtgatcgctatcagcgtcgggatcgtgctggcttcgctgttgtttatgcgccgtatcgcacgcatgactcatctggcgccggtcaacgtcgaggtgccagacgatgtgctggtgctgcgggtaattgggccgctgttctttgccgccgccgaaggcttgttcaacgatctggagacccggatcgccggcaagcgcatcgtggtgctgaaatgggacgcggtgccggttctcgacgccggtggcctggatgccttccagcgctttgtgaacaagctgccggaaggctgtgaattgcgcgtatctaacctcgagtttcagccgctacgcacgctagcgcgcgccggcgtcaagccgctgcccggacgcctgagcttctaccccgatcgtcaggccgcgctggctgacctgtgatcacccggcggcaggtccctgcgcctgccgcatcaaggatccggtcgcctgctgcagccagctcagcaccgccggcgtcatccaggtgcccttcatcaaatgcggctcctgctccattgcccgacgaaacttctgcaacgtctgcggccgggtaccggcgtaggactgaaacagttcaagccacgcccgggccagcgcctgacccgacgccgagtccggcgctacgccctcccggcacgcctgatgcagcttcgccaccagcgcaggccactcctgtagccggtcaaaatagtgctggcgggtgaacgccatctcttcttcgtcaaggtaccgcgcccagatggccagtttgctttcggcaaaggcctcggtgatataggcgatgattgccggcgtgacgccggtctgttcaaccatctgcggctcggcggcatgcatctcgttcaggcgggtcagaaactccggacgcccggccgtatcctgctccaggcgctccatccagcgcgtcgccagacgcatcgcctgcggactgtccgtcgggcagccgctcgccatcagcgtctgcacctcctccgttagctcgcgccacgcctgcgcccgctgttcatcctgtgccgcaaacggcagcgcggctaactcctgttgactaaaccaacgatcgtacattttcattaactccagcgtctgtagccaggactccagatcgggttcattgccgctcgccagcgcctcgcgcagcaccaatagtcggtcgcgcagcctgccaacatcgcgtagctgggcgttgagcatatctatctgctgcgtcagcagctcgggcagcgacagcgtttgccgatcgagatagtccttgattgtggcgagcgttagcccggcctgcgccagcgcctttatcatatgcaggcgctgaaccgcggacaggttatagagccgatagcccgcctcgcttctggccgaaggcgttaacagccccgtctgttcataatgatgcagcgtacgtaccgtcagtccggcacgcttcgccagctctcccacctgaattaacatgactgctcctctctgtggccaggtccgctactctgcagcctgacgtaacgtcagggtcaagcaaaaaccgcgcttgctattcatttttgctggcaaccatagcagcacgaaggccaggacggaatgggggcgtaatatggcgggaaaaagaggaagagataaagtgagacacagaaaagcgcatcggccttcagcggccgatgcgggaaatcatgctacggttagctgtgacgatgctggttacgacggcagcgtttatcgtagtggcgcacccaccagtagcggtcgctgacctgctcgtggccgccaatacgggcaccggccagccagagcactgcgccaacgaagatgcttaggattgcgccatgcgcaaagaattgtggcaggttaagctgcggaagctggttcagaatggagtaacctacccccacaaccatcaccaccaaccctaaccccatgagtacgttaccgagtaacgaagcgtttttgcgtttcatgtgtcacctccggactttgggttgccagggaatgtccccaaatcttataggtgtagtatagacaaggtctcttctgcggagtgcgtccacgatcacattagtgaacagcgaatagacaaaaatttacaaataagtctatgaaccatatcaaattctaatgatttagtgagtaaatcatcaatgcgggtattgtctaatagccagaattttgtcaagcgcgcccgcagacagtacactacgcggcagagaatgccccatgcaggatagaaaacgtgaccattaaactgattgtcggcctggccaaccccggtgcggaatatgccgctacccggcacaacgctggcgcctggtatgtggatttactggcggatcgccatcgtgcgccgctgcgcgaagagagcaaattcttcggctacacctcgcgcatcaacctggcgggcgaggacgtccgcctgctggtccccactacctttatgaacctcagcggtaaagccgtggccgcgatggcgaccttttatcgcatcaaccctgatgaaattctggtcgcccatgacgagctggatttaccgccgggcgtggcgaaatttaagcttggcggtggccatggcggccacaatggcctgaaggatatcatcagtaagctcggcaataacccgaactttcaccgtttacgcgtcggaatcggccatccgggcgacaaaaacaaggttgtcggctttgtgcttggcaaaccaccggccagcgagcagaaactgatcaatgacgctgtcgacgaagcggcgcgctgtaccgaaatctggttaaaggacgggctgaccaaagcgaccaaccgtttgcacgcctttaaggcgcaataagccgttgtcgtgcggcatttttgccgcgcaccgtgtataataggcaaagctattcaattttctgcaatctgttccttgtaacagattgattatccaaagattaaggtgatttaaatcatgggattcaaatgcggtatcgtcggtttgcccaacgtcggcaaatccaccctgttcaatgcgctcaccaaagcgggtattgaagcggccaacttccccttctgtaccattgagccgaacaccggtgtcgtaccgatgcccgatccgcgtctggacaagctggctgaaatcgtcaaaccgcagcgcatcctgccgaccaccatggagttcgtggatatcgcgggcctggtgaaaggcgcgtccaaaggtgaaggtcttggcaaccagtttctgaccaacatccgtgaaaccgaagccatcggccatgtggttcgctgttttgaaaacgataatattattcacgtcgcggggaaagtgaacccggcggaagatatcgacgttatcaacaccgaactggcgctgtctgaccttgatacctgcgaacgcgcgattcaccgcgtctccaaaaaagccaaaggcggcgataaagacgcgaaggttgagctggccgcgctggaaaaatgcctgccgcagctggaaaacgccggtatgctgcgcgcgctggatctgaccaaagaagagaaagaggccatccgctatctgagcttcctgaccctgaagccgaccatgtacatcgcgaacgtcaatgaagacggtttcgagaacaacccgtacctcgatcaggttcgcgccatcgccgagcaggaagggtctgtggtggtgccggtgtgcgccgccgttgaagcggacatcgccgagctggacgatgaagagcgtgacgagttcatggctgagctgggcctcgaagagccgggcctgaaccgcgtgatccgcgccggttacgctctgctaaacctgcagacctacttcaccgcgggcgtgaaggaagttcgcgcatggaccatcccggtcggggcaaccgcgccgcaggcagccggtaagatccacaccgacttcgaaaaaggttttatccgcgcgcagaccatcgcctatgaagactttattacctacaaaggcgaacagggtgcaaaagaagccggtaaaatgcgtgctgaaggtaaagactacatcgtgaaagatggcgatgtgatgaacttcctgttcaacgtctaatcccgctggctggcgttttcgccgccaccgcgcaaaaaaaatccacgcagcggcgtggatttttttacccggacgacacgctactccacaatatgggtatcttctgccgcctcgtagccatcaacgatctgcacaattttctttaactcagcctcaataaaagccggggtggtgctttccacagaggccgggtgatgaagctccaccgagatgccgctggcggcattggtcagcgacaggctgatctcctgctggccccgcgaggacgaagaacgcccgatatgctgcatgatagccgccgccgccgcgcgcgtatcaacgtctgcgagatgcccccacctcatttcaacatgtccctgctgccctgcctttatcatctgcagcgtatagccgcttcttgccgttgccatgccttttcctccgatttagttgcccgggcgtcacattatcagcccggttttatcagccaggttcgcgcacctgcgccttgccgttaatgactcttttccacataggtctgcatgttttctttggtcactaactcaaacgggatccagacatgagactcgaccttttctcctttaatcagcttcagcgctaccgctaaggccgttttgccctgaccgacggcgtcctggaaaaccgtcacctgaatcttatcgctggccagggctttcagcccgtccggggtggcgtcgatcccgccgatcagcagcttcttctggcttttctccagcgccatcgccgcgccaatcgccatctcatcgttgttcgccgccacaatatcaatcgcttctccgttgcccgtccagttctgcatcagatccatgccctcgctacgggaatagttggccggctgtttctgcaccactttcattgccggatacttggccaccacctgctccacatctttggtgcgctgcagcgcgccggcgtcggtgagattgccgatcatgatggcgacgttgcctttgtagttcgccagcttcgccagcgcctccatctgcaatgtgccagactcccgctcgtccgaaccgacaaacaccacgccgggcggtaacgttttatcccccggcgtccggttcacatacaccagcggcattttggcctgctgcgccatcttcgtcagctgcggggtgctggcggagtccaccgggtcgacgatgatcgcgtccacgccggaggcaatgaagctctgcacctgatcggcctggcgtccggtgtcgccgcgggcgtcttcaaactgtacgtcgacgtggcgggcttgagcttctttctcaatggactggcggataatagtgagaaagttttgatcgaagtaggccattgagacgccgatcttctctgctaatgccgaagcggaactggccagaaggcctactaacaggatgattttacagtgcttcatagtatgccctcagagatcgaaataaaattttcaatacaactacaaacggtatatttaaatcattttcagactacgaagggcgttcggttcttgcaatattgatgtaaagaaaatgttgccatgcgcacactttatttcaccgcctcactcaccgagggctcaccggttgcggggagcgcagcggtcggcgacgccggctgttttcgcttcagcagggcatactccactatcagctgttgcagatgcagctccgcgaggcttccccgcgcggctggccagggttgatcaacgggaagcgcggccagctggcgcagctgctcctccagcggaacagcgcggttaaacgactgcgtgatggcaaatactgcggttttcagttcgctcaccgtcaggtacttccccttctgctcgtcgagggcattgagctggtcggcgagccgctgcagttgctgcatgccctccgaccagccggtaaggttttccgcgggcaatgcgccagcactcagctgctgccgccactgctgcgccagcggttgcgcctgatccggccagcggatcagggcctggtggaccagctggtcgccgtaactgaccgcccagtccggcgccaggcgggcaagctcgccaagctggcgctgcgtctgtggcagatcaaccggccccgggggcgttgtcgccggcaggcccggtatcggtccggcattttgggtgaccgaaatgggcggcaagtcggactgacgcagcgccagccatccgccgacggcgatacccgttaccgccagcatggtaaccatcccggcgataaacggcttccagcgcggcgcggctgccggagtagacgccgccaccggcgcgggccgctttgcaggtgaaggcggcgccagcggctcagcttttggtctacgttttaggtctggcactggctcaaccttcgccgcatcctcttcgctgaccagagtgccgggaagttccgcgtcagacaccgccaccggcggcgcggtgggaagcgctggcgcagggtcgaggctctcgaagcgagttgccgtgctgtgcagtagcgcccgcaggtcgctcagctggttttcaggggcgatctcaaggcgctggagcactgcgtcgaagctttgcagcgaacgttcagcctgctcaagcgactcaacatcctctggggtaagattcagggtacggatcacctgccgcagccgcttgctcagggtgcggaagatctctgtccgggccgggagcgcctgtggccacaggtttttcccctgacgaaccagcagcgactccatcagcgtcagcccctcattgatccctgccaccccgcccagccgggcgcgggccagggtataccaggcgacagtctgcaggtccgcgccgtgatgctccaacagcccgcgggcaagctgctcggcatacggccagttaatatccggccgcgccgggtggctgagcttgttcatttccgcacgcagggccataaaatcagccagcgtgcgcgggtcgccaccggctttatagtgacggtcgtggtgtgttgtcatcatgatgtctttcagcgagagattagagggcggagcgggcgtcaaggtactgctggcgtttgaggtggcggatcaacaccctgccctcgggcataaactccgtgccgtaacgcaccaggccaatatccttcagctccgcatcaatggcatagcgcagttcgccgggcgcatgctgatcgagcatcaccaccgcgatccgctgcaggcgcggttcgtatttcaacaacaccgccgacaatgtgctcatcagctgatgcgccgacgctggcatcccctggaggacagcggtcatatccggcaggccgtagtccggcagatgcgccagcgttccggcccgacagttgaggatgcgctgcatgttatcgagcaccgacaggatgacctgatccgtttcgctgacagtattcaggtcaagcccgccggcgaaattgccgtacaggatgtcatacagggagggacgaggcattttcacttctccttaaacgggtgcagcgtcagttgattttggctggcttcgataatgcgcggcctcgccggatcaagttcgtcccgggtgagtaccagccgccagctgttttgcgtcaggtctggatcgataaacatggccgccaccgccacaaactgcgcgctggtttccatgggcatatcgacggtcaccgattcgcccggacgcaggcgaacatctttttccgccacccggtccgcctgcagcgcctggccatcgccggcaaacagcgacgggtagtcagtattgtcgaacgcttgccggtccttcagctgataaatacgcaccaccgtcgccagggaggcgcctttggcgttgttattcacgccttcccgggcgcgaagatccagatgcagggttttcacctgggggtaaaaaatggactgggtcacggaaacggcgccgtctttcacggtctgcgtcagtccgcagccggttaagacggtaaccatgaggaatgccagcaacctggcggagggtttaactgcggtaatcgccatcttcatcgctctccctgcggtggatattttcccggacgcgctgatagcgccccagataaatcgtgactctgtcgtcagcctgtttctgcgcatccagcggacgcagcacagcggtacggccgagctggacggcatgctcctgctggcagcaaagttgcgcatccggcagtaaatggcgggcgacgcaaagctgcagccgcacgtcaagatgagatccgagccagacgtgcagaagcgccatcaggtcgctgaacagttcgccgccgggcagccagccgcgaacctcatcaggcttttccgtggccagctgcagcaatacctgaccgttcacatccgtggcgtgggttcccatcactggcctatgttgcaggctaaccggctgacggacgctcatcgttaacggctgcgacaaggggatccggcagggatcgtggtggtgcaccgtcgcccgggtccccggggccaggagcgccaccagcgcctccatgccttccccggatctccccggcagcatcatcaccggcagcagcgccagaaatcgcgacagcggcgctgcggcaacggcggcacatcccggtatgcccagccccgccaggcccagcagatactgcgagatgttgtccgtgccgcccgcccgaaaggttgccgggtaggaatatttgcgccagatacggtaatactgggcgatcagccgatggttaaagatatcgaggaaatcctcggtggcctcgacgccttcccgccgttgcgcaatgtcatcgctatagtgggtcggcagcggggattccacgccgtagagtcccataaaagtcacgcgaaccgccggcggacggggcggttcaggatcgtccattccacggatttcgccagccggaaagcccatccccggatgcgggcgaaagcgtatgggttcatcacctactagccagccgctgccgatgatcggcgccttcggatggttcttctccagcaactggcagaagcggtaaaaattcatgtacggcaactgaggccggagctgcgccatcagccgggcaggcgcagactgtgattctctttccaccggatacatttcccatcaggttgaacaatgagcgtcagctggttgaactgattcatatcggcatacagtgcgaaaaagcggttgagcatgtcgccaaacaggtggacatcgcccgcaccggtaaatccgctaccgtcgagcgtcacttcaatatccagcccgcgcagcaggaaaccctgctcgaaacgctgaattcggtgatggctgaccgccagaatggcgtccagacggcgattattgagctcatcctcccgccagttgtagagcgacagcgtgccgcgcagcacctcggcgctgctcatcatgttgagaaaacgggtgcccagatggctcatgacccgccagtggtagcggtcttccgccgggggataggccggcagcgtgggcttacagagattgcggacggtaagcggcgtggctgatatcgactcacagcgatccagcagcgtgctctgtagcgcccggcgcggcagctggccgttagtgccggtgatgcgcaaggagaccgtttcccgcgccagctcccggtcagcctcccattgctgtccgccgaggataagccaggtatcgtgcatgccggttacgccccgttttacgcgggtgtggtagtagcgctccggcgcatggcgacgcatcattcccccctggtgacgaaagcgggtgaaaggcacatagcgtgcctccccggtgcgcccggagccggtcacgctgtcaacagaatagatttcggtatgcccgtcctgcaggcgcttcggacgcaggagatattcgctctccagcccgctgatggtcaacggatcggcctcaagggtaaacaggttaatcaccggcacacagtgcaggcgcaggctgcttgcgctgacgggtaaatcactttgccagacctcgctgaacaccacctcaagcgtgaaatgcgatatccccgccggcagggtgatgttttccaggccatttagctgcacgaacataaatttttcgcgaaaggtgaaatactcgagcagcagctgatagccgctgaaagcgctctcccccttcggccataaacaatcctcctcgctgaatccccccggggaaaaatagccgtcgaggcttacccgctctgtctgacccggcagacgcaggtacagcgcggcctggcgtcgggtcagccacagatggagggcgctgccggtaacagcgtcttcccccaggtacagcgccaggcggcggagatcggtctgcgaccagtcagccagctcgctacaggcgagtcgtagtcgcagggccgaacgtccgtccggctccgccgtcatcaccgcctcctctatcgccagcgggttaagcgtcagatcgcgggtggttcggtaccggcacacggtatttttcggccccagtgggcgggagctaatctcaaacccggcgggcaccgtttccgccatcttcatcgccggcagcgttggggtcagcgccacgatcgatagcgatggaatagtgcgcaaatagtgcggccacagcatgctgaccagcccctcggtcagctccggcagatcatcatcaattttttcgcgcaagcgacctacggaaaaggcaaagccttcaaacaggcgctcaacgtaagggtccggcgtaccggctttatcgagatccagcatcgccgcccgatcggggtgagcctgcgcgaacgcttttgccgcctcgcgcaggtagcgcatttcagcatcaaaatatcgcagggttaaatcgtccattatgaatattcccttattcgtctacagggagacacgcagcatggctgcgcggtcagattagttggccgtcgggcggccatgagcgaaggaggcctggcgttgcaggtcaacgccaatcagtgagggagaaggttcagtatccctcttcgccgggtgtatatcgtcggtcagcggaacacgttcagcagacgcgcgcacgctgaatatcgtctccggtagcgtaaagtttcgcagcgccagcagcgccagcggtccttcccccgcctcggtacgcagcgtgtagttcagaaacagaccatccggcgctttccagctcaggctccagctgctgctcgttccgggataagcgctgaccaccgccttatccagcagacggatccacccccaggcgcccgggaaatcgccatactggcgggtgcccgcccgggtactgatccagctcagactggcgcccggcgcttcggtgtcagcgggccagctgaaccgccgccagaccggcatctggttcatatagacaagtttctgattgtcgatgaccagctccgtctgcatcacgccgtccgcggtgccgggacgtagcgcaaaatgcaatcccgcttcgccgttggcgaacgcgacgtcggagagatggctcagggtattcatcgcctgcagaaaggccgggttaaacgtcagcccctgagcattgatactgtccgccatccagcggctcccctctttatgcagcacgccgttcagccgggtctgcagaaagcgggcgatgcgcccggtctcgctgtcgaggtattttgccagcagcggcagagagacttcactgctggtatttttaaaggggtagcgaccgccaaaagcgctattccagtcctccaccaccgcgctgcgccactgggcgttgagactttccgccgccggggtcagcacctgctgccaggcctgttccatcgggcgaacaaacagcgtttgcccaaatccactccactcctggcccagccccgccgccaccaggctgccgtagtcgcgcgtttcggttaaatccacggccttgccctggaataccgtctgcgcaagcaaccgggtcatcgcctgcggatcggtggcgttggtgacctgctgcaggcgcagacgcacctgggtgacgcgggtcaggaaggtctgcaggctaagacggctggtgggtgtcccgccgtcgcgattgtccagcagcgccagtacgggcccgaaggtggcatccagaggaccgcgcgagccggactgctgatcgatggcgggtgggttgtcacggttgaacagctgcctggccgatttgaccagcgaatcggcgatggcttccccggtctggccggttcgcccctgcacgctcagggtgttcatcagcgccaccagcggcgactggcgcacatcggccatcagggtcagctggtcgatagcatcggagagggtcgccgcgcgctgccagcgcagactgttgaggaaatccagccaggcgccgctgaaatcagcgaaataacgctccgccagcctggctcgcagagcttccggcgacgtcgactgcgcggcagtctgcttcgtatcgctcagcacccagtccatttcatcgcggcgttccgcgaccactttctcaatggccggctgcacggcctgttcccaggcctgacgggtaaacattcccggcaccacctcatcagtgctgaacagacgcgaagcatcggtgtcggcagtcatatccgccaggcgcatatcggcatactgattcgccacctgcgcgagcatcttctggtaaagcgtggactcactgttgcgctggcccaattggcgaattaaccgtgtgcgcacctggctgaccagaccgtcatcgacaggcagacgccactgcggatgcgatgccaggctggcggcataaaatgccagcagcgaagggccgctgccctgccagacggcgtcggcgatgcctgagcgctgcggccagtcctgcattagcgtagtggcgaaccacgcggcgtccattttttccgggcgggtcaacatcagatattgtttcagttgtccgtaagcggtcttcgtcatcttctcacgcagtgggctgtccggcggcagctgcacgaaggcggtgagctgctcttccagatgatgcgccgccgcatcgcgcagcagcggttgcgccatctccccgtagcgcgggaacagcgccgccagcaggtcatcgttctgactgaggccagcgcggaggtaccacggcgctccgtgctgcgagcggtattccagttgagaaagcgttttctgtaacgcggagagcgcatgcaggcgtacggccagcggctgttttcccgccgaggcctgctgcacctgctgctgtgcgatcgccaccaggtggcggttggcgataaaagagactgtcattgaggcggcccagagtaacatcagggcggcggcggccacgctcatcccacgcatccagttgactccctgtttgcgcggacgtagaccggctggcaaccacagcactgagtctggtatcgtttcccagcggttatcccgtccccagtgatgacggacactgcgaccagcctctactgacgcctcactaaataccaccccggccagcggctgcgggcggtaaggattaagcaataccgataacggctccgtcaccgtttccggtttacgggtcaactgatcggccagcgcgagtaaaaaattgtgctgtggttgcccgcatatctgctggatgccctgctctatcagtaacgacgccagggcagtgaactgttcggcaactatttgcggcgtacaacctgcaggtaacaggcagcctacaggctgagtgatacgtccatttttttcgttgcccccctcatacagcgaccagacgtataggggtagtttccagccaagagcttcgtagcgtagctttagagagtgagacacactgtccatttcatctggcgtgagcctgggcttcgttctgttcatcgttgtcaaaacgccgtcaaagcccgatgttacccacaccataccatcagccgggcgataacgcagtttacgcagcgctgtgaaccaggcgttatctaccgctgccccagggtctccaccccacagcaataatgtaccctgatcttcctgccagagttcctgcgtgagctttggggtcagttgttctacgtctctgactgagccaattatcagcagaatacggactttgcgggaccaggcgcgtccatactgatagcgtagagtctggcgaatttcccccaccgtaatatgatggggaggtgtcagcgccacgcgcccttcttcgccgggtaagacgctgtcctgctgcgactgccggcgatataaactctccttcacacggcgggacattgcaggaaggtaaaaaacaaataccaacgccagacagaccaggacaaacgccagtacctgctcgccccgcgtattgatattcagcatgccgccatagcgggtgatcccccaccatattgcagccatcccggccaacgtaagcccggccaggccaaaccggcccaggccattacccggtatattcatcttcactccctggggtgatggtactgataaaatgttcctgttcgctggaaaataacgccagcaggggctgtttacggaggctgaccagatcggctgccagcgcggtcaggagccagggcgctgcgggtcccggaataccgcaccatttttccagcagcgcgatatcttcagctttccatggggtatgcattttgccgccctgcgtgataagcgcggcgcttctttccgtccatttttttgcgtccccgataacggagggcgtatggcaggcgacagtctgggtttccagaaacagggtgatatcgtcttcaaagttcgtcatatctaagggcataggacgtaacagccgtgatgagtgcggcagatggtatttttgcgccacatcatcgctggtcagcagcagcacggccagcccgtcggagtatgctgtaccaccgttgagctggatgaccaggagtaaattgaccgtcagtacaggctgcttcaggcgctcctccacttccgacagtgagaatgagccggtaacggtaatatcatcaggcacggcacggccaggaatgtgttctttccagagattactgaaactgctggtcagctcaggcgagggattatccgtgatcagggtgacatacagcggtagctcttccggcaggcactgcacgcgctcttctatactggtcagcagcgcatgcatcgcactcaactgcacgggctcttctaccggaaggtaattaatcctgcgggtaagtccgtattgctgaggccgctcactcccccaatgcgccgcagaaatatgatccggcaacagcactgcactgcccagaacggccagccagcgcccggcccagtcttcccacctctgctgtccgtattccgcctctttcagcaagaactgatgcgctttcagatccctgtcccacaggtagcaacgcagacaaaaaatcagcaaccagcatcctgcaggcatcagggatacccaccagatatttatcactgagagaatttttacggtgccggaagcatggaggataaagagcaggacaccgataatcgccatcagtacaccggcaaacagccatcgggtcagtgaaggagccgatggctgctccatggtcaatgcttttgttcgtacccagcccattttttatcctatcgcgcattccggcgcgccggaaatcacctggcaaccgcactgacatttgcagccatcgaccacgatggctttaccatcggaagaccattccggcgatccctcaataatggcattagtgccatgtcccggaatcgggcagctgaccttatcccccaccagcgctacgggctttccatttacaatcatggtggaagatgcggaaataacagcaccgccgtgcgtggttttatcgccgagtaatacaaaacctttggacattgaatttccttttatatatcagcgatgcagtaattatttattcgcatactctatcgcatctattttaacaaggggaatggcggcaatgacattcaataataaacggaaacctgtcactcccatcaaagaaagagtgacagacacaaagtaagatccggcatatctgtacgcctctctttactgaatgtatacctcttccctgaggtgatattccccacattaaggatttttcacttcgaacgtcaatttccagacaaccgtattttcccgagagccgcctgaatttcttttgcatgttctatagaatagaaagttacactaacaacaaaaagatcagaattataaacgaataaaacagctatattttgattaggtggcaacagtgggtatacctcactaataccacgactatagctccccatcgttttaggctcaccataaatcattgggagcccaaagcgttcgcacacccatttctgtgtcattacaagttcaagaccaaaaggcattgcattagggaagacccaatccatcttctcatcatcttcaagagtcagcgtaatttcgttaaaaactttatctttatcattctcaaaagataaatatagctcttcacgcttcatatacagtgatgctgtatcaacatccactggtccaactggttttgttttataaggaatcaacccgtgactgtaaatttcatgatagggattccccagttgttttaccagtttttcgacgtcaataatcatttgccaccaagttgttttttctccagtactgcctgaatctctttggcccgttctagtgggtaaaaagtcacggtttctacaaataaatctttgttataggtaaatacggcagcgatatattgatgaggggcaggcagagcatagacctcttttacccctatataaatagtcatgattatttccgcatcagcataaatcatgggcaacccgaagcgctctctaacccacaattgggtcatcaccggttccatactaaatggcatcgaattggggaatacccagtcagttttaccttcatcttcgagtgttaatgtcacttctttaagtttttttccgaattattaataaacgctaaatatatcccctctcgtttaatattcaatctggctgtatcatcatcaatggcaccataaggttttgttttataaggaatcaacccgtgactgtaaatttcatgataaggcttacccaattgttttaccagtttttcgacgtcaatgatcatttgccaccaagtcgttttttctccagcgcaacctgaatctcctttgctcgttccagcggataaaaagtcacactttctacaaagaaatctttgttatagctaaacgacgcaactatattttgatcaggagctaatagcggataaaactcctttactcctctatagagagtcataaccactttcgcatcaacataaatcatcggcagcccgaagcgtgcacgcacccactgcagggtcatcaccggctccagaccaaatggcatcgggttaggaaacaaccaatcagtttttccttcatcttctaactttaaagatatttctttaaattttttatcaggatcattcgtaaagaccaaaaacatcccttcacgtttcatatttaatatagattcatcatcatcgactgcaccgtagggttcagttttgtaaggaatcaagccgtttttaagaatatcctgatagagcttacctaattgttttaccagtttttcgacatcaatattcatttgccaccaagccgttttttctccactgctgtctggattgttttggctttttccagtgggtaaaaagtcacggtttctacaaataaacctttgttatagataaatacggcagcgatatattgatgaggagctggtagagcatacagcataaatcatgggcaacccaaagcgctctctaacccacaattgggtcatcaccggttccataccaaatggcatcggattggggaatacccaatctgttttgcctttattttctaaccttaatgtaatttcagtaagatttttctcgaaattattggtgaaaaccaaaagaattccttctcgtttcatatcaaattcagcttcatcttcatcaatagggccataaggttttgttttataaggaatcaaccctttctcaagaatctcctgataggacttacccaattgttttaccagtttttcgacgtcaatattcatttgcgaccaagtcgctttttctccagcgcaacctgaatttctttggctcgctccagcggataaaaagtcacactttcaacaaaaaaatctttattatagctaaatgacgcaactatattttgatcaggagctaatagcggataaaactcctttactcctctatagagcgtcataaccactttcgcatcaacataaatcatcggcaacccaaaacgcgcccgtacccacggctgcgtcatcacaggctccagaccaaaaggcatcggattaggaaacaaccagtcactcttgctttcatcctctaacgttaatgttacttctttcattttttttcaagatcattaacaaatgctaaatatataccctcatgcttcatatccagcctggcagtattatcactaaccgagccataaggttttgttttataattaatcaaacctttattgtaaatttcttggtatggctttcctaattgctttatcagtgtttcgacattaacattcatttaatataaccccacatttcggtttaacttatgtagttttgctctgatctcttcgattttctcgttactcataccatattcattcttaaggcattcagcattcgcatcccagttggcattgacggcagcttctaagtcacgagcatctagctcttttttagttatcatctcgccgctttctgtctctaccttacgattattacgcccgccataggtttcactacatttttgatgaacagctattggaatagcaactgaagcaaccttatcaaccatcttatctatatatttacttccctcatcaggatataaatcctctaaatatacacgaaccgcatctctagatggaatatgatcgacttgatattttccctgccttgaacggccttcaaaattttcataatagtcaacctcatactcttccacaggggctttcttaaaatacacatagattgccgggacaacccccatcgggtcaacaataataaagtcatcgaaatcccggtcttcgatgggcaatgtttcaatatttggttcctgttcctccgggatcggcgttcccggtacgggcggtaacgattccggggccgggttaggcaacccccagatgctccgcggttccggaatgggtgtaggcggtgtggtagagccgccagcgctcccgtcatgaacagtcgtctggctggaaccccactcaaattttccctgcccggcagaccgggaccagacaaatgtgcctttaattgaaggatcttcaaaaccccatgtctctttatccagctgttttgcaaaccgcacccggacccgatccaacccgcttttttcccccacctcatagctgcgggaaaccagttcccctgactcaggatcttcttcaatacgaaagcgtaccctcgtgcgcactgtgccgttttgtcgggctatttcccggagttcatattccgggacataatccccctcaatgaccgttgaatttacacgggtaaaagcgcccaccatcatctggccatggatcagattctgatagagctggtcgccacgtatattttgtagcgtttccgtctcaccttcattcagtgacggagaatagaagatagccagcagagcaacggtgaggggattaggcgcagccagcacccgtgcgcccgcgacgccttctccgacacctgccgcagtccccgcccccaatgaaagcgaatttcccagcgttgtggctgttggccctgcataataaccactcattgaggcggccagcgccatcgattcaaaaaatacctgtgcgggtttacgttcaacaaccggctcttttgcggctgatgatgtttttccctctccgggtcccagtatttgtgtcatcccggctttctcctgtccatggctcacagtagctctatttttattgactcaggcaatgcggtataaacgctggccgttttcccctcagcatctgcccggccttcgaataccgggcctttttcagtggtgatgcggtaacgggcaaaaagaacaatttcatcggtcttatgatcacattaggggagcagctcttcttaagaatgtggtcaacattgcgggaacagtacagagatcagggaatatgaattagctctgtaaaaaatcatcatttacaagcagtaaaacattaacgcttatttattcattaatctatttcgctctgacgcagcctgaattgcttctgcatgcgccatagaataaaaagtcacactaacaacaaaaaggtcggcgtcataaacaaataaaacagcaatattctgattaggtggtaacagtgggtatacttcactgataccacgactgtaactccccatagttttaggctcgccataaatcattgggaacccaaaacgctcacgcatccagttttgagtcattaccggttcaagattaaaaggcattgaattcggaaagacccagtctgttatgtcatcatcttctaatgttaatgtaatttctttgaaggttttatttttatcattctcgaaagagaaaaacaatccttctcgtttcatgtctaatgtagctgtatcatagcccgctgtggcagttggttttgtcttatatttaattagtccactatcataaatttcctgatgatctttacccaattgtttcacgagtgtttcgacatcaatattcatttgccaccaacatatccagataggcttcattttcatcaaccgggccatgcagtttattcttatagggaatcaattcttgctcaactatttcctgataaggtcgactaattttcttaataagctgttcgacatcaatactcatttgataaatacaccacacgtcccgacatccggctaaatactatcttcatggagcaagaaaatggtccagtcatgaccggaccattaaggattcattaactctctaatcgttttttctccagtacggcctgaatctctttggcccgttccagtgggtaaaaagtcacggtttctgcaaataaatctttgttataggtaaatgcggcagcgatatattgatgaggagtaggtagagcatagacctctttcacccccatataaatagtcatgatgatttccgcatcagcataaatcatgggcaacccaaagcgctctctaacccacaattgggtcatcaccggttccataccaaatggcatcggattggggaatacccagtctgttttgcctttatcttctaaccttaatgtaatttcagtaagatttttctcggaattattggtgaaaaccaaaagaattccttctcgtttcatatctaattcagcttcatcttcatcaataggaccgtaaggctttgttttataaggaatcaacccgtgactgtaaatttcatgataaggcttacccagttgttttaccagtttttcgacgtcaatgatcatttgccaccaagtcgttttttctcaagtgcagactggatttctttcgcctgttcaaccggaataaatgtgatcctgttaacaaaaaaatctttattgtaagaaaatgccgctgcaatattttgattcggagtcggtaaaatatatgtttcctccaccccgacataaatagtcataatcacgcaggcatcaacgtaagtaatcggatgaccaaatcggtctcgtacccatcgctgtgtcattactggttcaagaccaaatggcagcaagttaggaaataaccagtcagttttattctcatcctctaaccttaaggtcacctccttaagatttttatcttgattattaaaaaatgataaaaataccccctctcgtttcatatctaatctataaatgtcatcactaaccgtaccacttggttttgttttgtaggggatcaatccttgctcataaatatccagatacgatttcccaaggttctttatcaacttctcaacattcaagctcatttaatataaccccgctttccggtttaactcatgtagtttggccctgatctcttcaattttttcatcacttacaccatattcattcctaaggcactcagcattgacatcccagttagcatcaactgcagcttctaaattactggcatctagaactttttgagtgactaatcctccgtcttgtgttctaaatttactattgtttttcccaccataggtttcactacattgccggtgtacttctatcggtatagcgacagcagccactctgtcagtcatttgttctataatgtcatctttcaggtttggatatgtccctttcaaatatatcctaacagcttcctttgaaggaatatgatccacttcatataggccctgccttgaacgaccttcaaaatttccgtaatagtcaacctctaaatctctaactgaagctttctgaaaataaacatagattgccgggacaccccccatcgggtcaacaataataaagtcattgaaatcccggtcttcgatgggcaatgtttcaatatttggtccctgttcctccgggatcggcgttcccggtacgggcggtaacgattccggggccgggttaggcaatccccagacgctccgcggttccggaatgggtgtaggcggtgtggtagagccgccagcgctcccgtcatggacagtcgtctggctggctccccactcaaattttccctgcccggcagaccgggaccagacaaatgttcctttaattgaaggatcttcaaagccccatgtctctttatccagctgttttgcaaaccgcacccggacccgatccagcccgcttttttcccccacctcatagctgcgggaaaccagttcccctgactcaggatcttcttcaatacgaaagcgcaccctcgtgcgcactgtgccattttgtcgggctatttcccggagttcatattccgggacataatccccctgaatgaccgggtaatgactccaatttactgatagtgttttatgttcagatagtgcccgatgactttgtcatgcagctccaccgattttgagaacgacagggacttcctgcccagccttgccagatgctgtctcagattcaggttgtgtcgctcaattcgctgcgtgtaacgcttactgatgacgtgcagttttcccttcagacgtgactcatacatcggccagccgtccgtcatccataccaccacgtcaaaaactgacagcaggctcagaagacgctccagtgtggccatagtgcgttcaccgaaaacgtgggctaccaccgccctgcgtatcctgtcatacgcgtaaaacagccagcgctgacgtgattttgcaccgacgtagccccattgctcgtccatctccgcacagacaatgacatcactgcccggctgtatccgggaggttactgactgcggcctgagttttttaaatggcgcaaaatggtgttgaggcccacgcccattagtcgtgcggtggcacggcaaccgacgccgttcatagccatatcaatgattttctggtgtgtaccgggctgagaagcggcataagtgaaggtgagctgccatgttttacggcagtgagagcagagataacgttgatgcccggcagtacttttgccattacgcatcacgccttcagtagcggaacaggagggacagcagacggagactgaagccacgggagcacctcaaaaacaccattatacactaaatcagcaagttggtagcatcaccgaatgaccgttgagtttacgcgggtaaaagcgcccaccatcatctggccatggatcagattctgatagagctggtcgccacgtatatcttgtagcatttccgtctcaccttcattcagtgacggagaatagaagatagccagcagagcaacggtgaggggattaggcgcagccagcgcccgtgcgcccgcgacgccttctccgacacctgccgcagtccccgcccctaatgaaagcgaatttcccagcgttgtggctgttggccctgcataataaccactcattgaggcagccagcgccattgattcaaaaaatacctgtgcgggtttacgttcaacaaccggctcttttgcggctgatgatgtttttccctctccggttcccagtatttgtgtcatcccggctttctcctgtccatggctcacagtagctctatttttattgattcaggcaatgcggtataaacgctggccgttttcccatcagcatctgcccggccttcgaatacctggcctttttcagtggtgatgcggtaacgggcaaaaagaacaatttcatcggtcttatgatcacattaggggagcagctcttcttaagaatgtggtcaacattgcgggaacagtacagagatcagggaatatgaattagctctgtaaaaaatcatcatttacaagcagtaaaacattaacgcttatttattcattaatctatttcgctctgacgcagcctgaattgcttctgcatgcgccaaagaataaaaagtcacactaacaacaaaaaggtcggcgtcataaacaaataaaacagcaatgttctgattaggtggtaacagtgggtatacctcactgataccacgactgtaactccccatagttttatggctcgccataaatcattgggaacccaaaacgctcacgcatccagttttgagtcattacaggttcaagattaaaaggcattgaattcggaaagacccagtctgttatgtcatcatcttctaatgttaatgtaattcctttgaaggttttatttttatcattctcgaaagataaaaataatccttctcgtttcgtatctaatgtagctgtatcatagcccactgtggcagttggttttgtcttatatttaattagcccactatcataaatttcctgataatctttacccaattgcttcacaagtgtttcgatatcaatattcatttaccaccaagtcgctttttctgtaacgcgacctgtatctctttggctcgctccaaagaataaaaagtgatttttttacaaaaaaatctttatcatatgtgagcgctgctgcaatatgctggttgggcattggtaaagcgtaaatttctttaacccccatataaatagtcataacaatctttgcctcaacatgaaccatcggcaagcctaaattctcacgagcccactgctgggtcatcaccggtttcagaccaaacggcatagggttaggaaataaccaatctgtcttaccctcatcttctaatcttagtgtgacttctttaagtttcttttctgaatcattaacaaagaccaaaagcattccttcacgtctcatatccaggtcagcttcatcttcatcaataggaccatggggttttgttttataaggaatcaatcctttctcaaaaatctcctggtacggttttcctaagtgttttataagtgtttcaacatcaattttcatttagtacaaccccacttttctgtttaagtcatgcaattttgctctaacttcttcaattttctcatcacttatgccatatctttctttaagacacttagggaaggtgcgaacaagttcctgatatgagatcatcatattcatccggagcgcatcccagagggacatcatgagccatcaactcaccttcgccgatagtgaattcagcactaagcgccgtcagacccgaaaagagattttcctctcccgcatggagcagattctgccatggcaaaacatggtggaagtcatcgagccgttttatcccaaggcgggcaatggccgacggccctatccgctggagaccatgctgcgtattcactgcatgcagcattggtacaacctgagcgacggtgccatggaagatgccctgtacgaaatcgcctccatgcgcctgtttgcccgattatccctggatagcgccctgccggatcgcaccaccatcatgaatttccgccacctgctcgagcagcatcaactggcccgtcaattgttcaagaccatcaatcgctggctggccgaagcaggcgtcatgatgacccaaggcactttggtggatgccaccatcattgaggcacccagctctaccaagaacaaagagcagcaacgcgatccggagatgcatcagaccaagaaaggcaatcagtggcactttggcatgaaggcccacattggtgtcgatgccaagagtggcctgacccacagcctagtcaccaccgcggccaacgagcatgacctcaatcagctgggtaatctgcttcatggagaggagcaatttgtctcagccgatgccggctaccaaggagcgccacagcgcgaggagctggccgaggtggatgtggactggctgatcgccgagcgtcccggcaaggtaaaaaccttgaagcagcatccgcgcaagaacaaaacggccatcaacatcgaatacatgaaagccagcatccgtgccagggtggagcacccgtttcgcatcatcaagcggcagttcggcttcgtgaaagccagatacaaagggctgctgaaaaacgataaccaactggcgatgttattcaccctggccaacctgtttcgggtggaccaaatgatacgtcagtgggagagatctcagtaaaaaccggaaataacgccagaaatggtggaaaaaatagcctaaataggctgattcgatgtgtttgcgggaaaaaaatcggcccagatccgcgaaattttaatcagcgagtcagcttgggaagaaatgacctgcttattcgcaccttccttagcattagcattccaattcgagtcaacggcaaattctaaatcacgagcatcaagttcttttttagatattgtctcaccattttctgtttctatcctactattattacgccctctgaaggtttcactacagtcacgatgtacatctatagggatagaaacgactgcaaccttaccaagtaatttttttatatcatccttttctgcttcaggatatttattaatcaaatattctctaaccgccgcttttgatggtaaatggtcaacctcgtacattccttctcttgacctcccatcaaagtcgttataataaccggtttctagaaatccggcaggagccttcttaaaatacacatagattgccgggataacccccatcgggtcaacaataataaagtcatcgaaatcccggtcttcgatgggcaatgtttcaatatttggttcctgttcctccgggatcggcgttcccggtacgggcggtaacgattccggggccgggttaggcaacccccagatgctccgcggttccggaatgggtgtaggcggtgtggtatagccgccagcgctcccgtcatgaacagtcgtctggctggaaccccactcaaattttccctgcccggcagaccgggaccagacaaatgtgcctttaattgaaggatcttcaaaaccccatgtctctttatccagctgttttgcaaaccgcacccggacccgatccagcccgcttttttcccccacctcatagctgcgggaaaccagttcccctgactcaggatcttcttcaatacgaaagcgtaccctcgtgcgcactgtgccgttttgtcgggctatttcccggagttcatattccgggacataatccccctgaatgaccgttgagtttacacgggtaaaagcgcccaccatcatctggccatggatcagattctgatagagctggtcgccacgtatattttgtagcgtttccgtctcaccttcattcagtgacggagaatagaagatagccagcagagcaacggtgagaggattaggcgcagcgagcacccgtgcgcccgcgacgccttctccggcacctgccgcagtccccgcccccaatgaaagcgaatttcccagcgttgtggctgttggccctgcataataaccactcattgaggcagccagcgccattgattcaaaaaatacctgtgcgggtttacgctcaacaaccggctcttttgcggctgatgatgtttttccctctccggttcccagtatttgtgtcatcccggctttctcctgtccatggctcacagtagctctatttttattgactcaggcaatgcggtataaacgctggccgttttcccctcagcatctgcccggccttcgaataccgggcctttttcagtggtgatgcggtaacgggcaaatggcacaatggcaccggtcttctgatctttgacagtaaaacgctcttcgaaccctttaggcaattccagcggaggcacccgaaaatccgccttacccattttctgcacattggccgatttcagcagaatattcccagggcagcccagctcgatattgccaccacttagcctgatatacgctcccgcacagttcaccaccagttcctccgccgccgtgatttccactcgcccttccacgctggtcacggtgatatcctttttcgccgtcgcctccagcgcatcatcctgcgcctggatttcaatctttcccttcgccgcaaacagcttcatccccgcctttcgcgccagcaggctgacggcttctcccgccgccaccgtaaaacgtttcagcgcactgatgtccgtattctgctgtgacacaatccccacgctggcgctacccgaagacaaccgtaccgcctgcggactgctgatgctcacgccctgcggcgcattcagcactatccccggctgcgccagctctttcagcgcatcgttcagcgtctgctggttgccggtatccgatggcagggcctgagccgattccgctgccgacgccaggcttttcgcaatacccagggcattttcaagctgcgcaatcgcctcctccattgccagcatcctgtcgcctgccgaaggctgtttatccgcactgataaacacccccgcaccgccccggatgctcacccatttatccgtacgcagttccgcaccctcgccccgcaactccctctgcgcattcacgttatgccccaggttcagctgcgtcttgccgccgtactcggtgctgagcttgatatgctcctcgccgcgcttgtcctccattcgcagcttattattggccggagtacgaatcacattgcgggtgctgtttttctccgtcaccgggtcgacatgccgcgagtcgtgcagcgcatgcgcaatatacggccggtcagggtcgccttcgtggaaagcaatcgccacctccgtgccctggatcagcgggaagtgaaagccgtacacgtcgccgccgtagggtttggcgagacgcaccggcatgctttcctgaccctgccctttctcctctctgtcagcgtcaaatttcacccggtacaggccggacgcatcttgccaggcatagatatcattcgccttcgcgctggtcacccgcgccgtcatggtgccagtcaccttcgggcgcggcagcagcggcggacgccagcacaatgtttcgctgtagggcaccgccagcagggacacccgcagcgcctcccggcggctggcggtaaaaccggtgccggtgattaacagcggatcctgtacgggcgcaggcagggtcgacggcaggctgtcggtaacggtcagcacctgggccggcgccagccaggctgcagtactgctcgcggtaataagcgtctggtgagccagaaaacgctcatggtcgaggcgggcatagaagttggcggtctccgtctgcgggtcgattttatcgccacgctcccggtggcgaagcttatagtggtatacctcaccgtaagtgatgccttcaccatttccccgggtcatatccgctgttgccgactggagaacgctctgcgcatcgcgggggttataatcccgggtagtgacgttcgcctctacgacattgtgcgtgatgttcagaccccatatcgattccgtaccgctgtcgctcatcccggacgggctgtttacaggaagtgttttatcgaacatcagcgcccgctgcgcgtcggcgaaatggaccacttcgctctgggcctcttcctgcagggtgaagaaataaaatatccccacctctgccagcaggcgctggataaatgccaggtcgctctcctgatactgattaatttgctcgcgccgcggatagtgttgcttgagattaaactcatactcccagtcatgcaggtgatgttcctgcaatacctgctccaccacctccggcaccgatttattcacgaaaaaacggtggctgcgaaactgtttatccagtaaggagaggaagggttcgagggttatctgatatttcgactgatcttctgaactgctgatacgccggaaggcagtcaccacgccatggacgcgtttgcagtccgccagctgctgcagtgcgccgccgcccatcgtcagcatggcgggtttgctcaggagctgtgcggcatcaatatttttctctgcgctggtaaacgtaatagtgtaataataaagttcactcagtttttctgccccactgaattcttccacatccagcgatgcggtacatgaaggaatatccagctggtaacggttaagggtggtgccggtaattattgaagaggtatccattatattcctgttttactccgctgtaatgactatcaaaaatcaattcacaggacgccctgtttaattttgtttaatgacaatcatctcattcatcataaatatatttatgtgcatatcgatatatcagataccccaccaggagtttcgtaactaaaaggtaaccccagggatatttatattcactgactgagaaataaaaaaagcagccagaaaccggagccttcaacgtttatcgccgccagcatttctctggcactgtctttagcgctatccatactgatctcctttatccatcccctttcccgagcttcatccccgcagaggcttcgcttagccgacaagattgactggctgcaggcacgctaccgcccatcgctgtttcctgtttatcagggacccgtagcgcacagggtcaggcaggcagattgttgttcaacctccgcgatcggggtcgctgattactcggtttcgctttttaatccgttagtctctgctcctgaggtattggccgtgcccggcgtcagacaggcgtccttctgcgggaccagactgatctccacccggcgattttgcgcccgcccctctggcgtctcgttgctggcgacaggacggcttgcgccgtagccctgcaccgcaaaacagctcaccggcacatcgccggtatcgcgcatccagtcgcggaccgcctcggcacgcttcagggagagttgttgattggatctatcgttgccgatgctgtcggtatggcctgccaccacgatcagccagccgggtttggccttaatgcccagcagcgagttcaccagcagctttgtcgaacccggtttcagcgtcgatttgccggtatcgaacagcgccatgctatcgaggcggatcgtctgcggcccctgcacaacctgcttaatgaccggacgcggcggcgggggcggcgcccagtcattgatagcggcttcaacgaaggggatcagccgccccccctgatacagccccagccgataacgcagcggctccccccggcgcaaccagtcatccagcaggcggctgtcggcacgcagacgctgctgcgcctgcagcttcggcgtcggcggcgtgccgctgaggcggtgataccccgccagatgatcgccgacgctgcgcaccaggcgctggttgttgataaaggaagccagcatcgccagcgccagaaagaggaagcccaccccagcggcaagaccggcatcgcgcatccggcggctgaccccgtggcggtgcggcagtgacgacagaagaagatccggcagcgggtgaggacctggcgccgcgtcgttgcccggggagagcgtggtgatcccggcgatttgctgttgccagaggttattcgccaccgccgccaccggcgtaaggcagatgcccgcggcacacaggttcagcggaggaagttctgcctgccgggcgcggaatggccggaaaagagcgttttcggccaaggtcagaatgctctccagccacagcgtctgatgcaggcgtgaggcagagctgccctcccgctgccacccggcaaccgcctggggcgcttgtcccttcagctgcacctggagaccagccctctccggcgtgatggtaaaccagcggctttccgcggcctggccgcctggcggcgtcacccagaacacgctccacaccggcggcagaccgtttagccaggttcggcactgaacgatactccgccgccagtcgcgcagcgactgcgccagatgctccccggaggggtggtgctccggtaccaccgccagcagcacggaaacctgcgataccagcgccggacgcgccgccgccaggtactgcgccagccgcggcaactgctccgcgctgtcaccccggagataccagccgtgacgggtttcgccgtgcgccgaacgcccgggaaacagaccgtcggtatccccgcagaccagaaccaccgccccctgaaaatcctcgggcggcaggacgatttccgatcgctgacggctgactgcccggcgacgctgacgccagagcgccgcgccgcccgccagcaggatgcacagactgaagatcacctggttgccgatggacagcggccagaagcccagcaccagccacagggccaggatgacggtcagtatcgtaagcagacgacgggcgttatcacgcatctcttatccctgccctgctatctgcgccaccatctgtgacagcatggcggagaaggtcaaccacagcgccgtcagcgccacaatgccagccgcccagccgcaccagtacatccgccgtccgctgcgcagccgggaggcacgaaccaccaccggcgcctcctgggtcaggctgaacggcgggacccgcgagccaagcgcttgcgccacgtcctcacgccgttcgtcatcctcggcgcggtactgtccgacaaaccccagttgcaaagtacgatagaaacaagtcagcactgccgcatccgccgtgggctctcgcagcagctggcggatccgttcccagagctcttccccggcgttgagagtgctgaaaaagcgcgcctgcagcggatccttgcgccacctgcggtagccatcatcctgactggcgcggttgaggacgctctcatcgagcagcgcgcagtaggcatagagcatctgctcagcgctggcttcactgactccccccgccgtcagcgcctcgcgcgcctcggtcacccatcgacaggcctggcgatagagcgcctcgccatccgtcaccggctggccgcagcgtaactggctgaccatcagccagcccgggtaaaaagttttgttgatcagatcgctttcagaggtattcatgaccgcagtaccgcaaagagttcaagtttcacgtcgccaagcgattccggggtatagaaggtgcagttgccggcctccagcatcgcgcgggcggcatcggtggagagatccagagcgaaatattggttttccagacgtagcggaatggccgccggcacatggctcagcggtttgatcgcgatgccgctgagggcaatattgacgacctcggcgacatcatcatggctacccgccttacagagctgcggaaagcggctctgtagctggtgaggggggagtgaagagcgcaccgacagataaaaatccgccccctcgcgcagacgcgcatcgtgcagcctgccccgccagatctcccggtcggcgccctgctccagaacgatggcgatcacccttgagggcaggctgacttcgagcagcgtatccagcagggcaaacagcggtgggaatacctgctctggcgaggcatgtcggtagcgggggattgcttccagatgatgttcaagggagaaagtcagcagactgccggccagcctggccagttcgcgatagagcagctccggatggcgcgaagggtcctgatgcagctcgctgagcaccggttcagcgctgttcagcgcgttgagcagccagaacagggaaacatccgccacggcaaaatcagccatccgcgcattgctttcacgacgcatggccatcaggcgtctgcgtcgggcctgcaggcgatgtaacagctcacccagctcgctaaccagcgtcgggcttgccgccagcgacagcagcggcgggatgaattccgggtcaacgatccactgcccctgggcgtcgcgcaccagacgcgctaccgggcaggtgaggaaagctgcattttcctcggtggagagacgcagcgttagcgcgtgccgcagaacggccagctcgctgcgttcatggccggccagctcctggacggtcacctgctcggcgcgccagcggcgcgggcgggcgctctcctggccgtcatcaagattgccgccgctggcgctgagcagcggcagagcgagcagaacctccacgctgtcctgcatcacgtccgatacatcgcggaccggtggcaaaatatccgccagctcggtgtcaatcagcgttccgtcggcgaaacgcacgatcagccgggtagcgttgagccgggaaagggtgagcgcgctcgcgtcaaactccgcgcgcaataccccccacgggtgggcgagcgccatgcgggagaccgtatcggcgacgtgcgcgtcccagcgggcctgttgctgaaactgctgcgggaccagaaaagccccgtcgcgccataatgggcggaaaatcttcattgcacctcctgtgcctttcgctttcattggtctgcagacaggaccaaatgcccggacggatatccctcatccgccgtgtgttcagctggatttattacctgccgcttcagggaaaggaaatatctcccctgcccgcgagagtttcgaagtcagatggtattttttggtcaagggatgtttatcataaagcgaaagagtcagggggaggtaacgcctggccctaaataatatctgaattcaacccaaggtagctttattgctctcggtcatcacatgtagaaggaatattccataagcgacccttttattattttcctgttgaatattaattagcgaattaatccctccgtcaggaatatttatatttaccttaaatataaataataataaaaatatcaccgcaatcgatataccctcagtagcaatgagtccagagtctccccggcaactgccagatgcccggaggagtgccccgccccacccggccattgccaggcgctgcattaccccgtattttggtttcccgctccgctgtgggcgggtgtcagggcgaacgagagagagaaaatgaaaccactatttgtctatgggacgctctgtcccggtcgcagcaatgcgcatattctggaggcgatcgggggcgagtggcgtcccggctacgtcaccggcaccttttacgcgcgcggctggggcgcagccgccgatttcccggggatcgtcctcgacgctcacggcccacgggtcaacggctatctgttcctgtccgatcggctggcggcgcactggcccatgctggacgactttgaggaagggtacgatcgggtgccggtggaagtgaccaccgacgatggacagcagatcagcgcctggatttatcagcttcagccccgggggtaatcccccgccgcgctgcgcggcatggtacagcagcccagcgcgatcgcgagtctggcgtcgtttctgccaatgcaggtatacttgccagatgtttcctcagtttcagacacgcagatgacaaaactcaccttacaagagcagatgctcaaagccggcctggtcagcagcaaaaaaatggctaaagtccagaggacggcgaaaaaatcccgcgttcaggcccgtgaggcccgggaagcggtggaagaaaataaaaaagcccagctggagcgtgataaacagcttagcgagcagcaaaagcaggcggtgctggcgaaagagtataaagcccaggtgaagcagctgatcgagatgaaccgcattacggtcgcccggggcgatatcggctttaactttaccgataataatctgatcaaaaaaatcatggtcgacaagcccacccagacccagctgattaacggccgtctggcgattgcccgcctggcggtggataacaagcccgaaggtgaatatgcgattattccggcggtagtggctgagaaaatagcccagcgcgacgccagcagcatcgtgttgcacagcgccctgagtcaggatgagcaggatgaagacgatccgtacgccgactttaaggtgcccgacgatctgatgtggtaaccccgggctttcccgccgcgggcgatcaaaacgggctcgcctgctggatatgcatcggctcatggctgacggggtggacaaagcgcagttcgctggcgtgcagcatcagccgcggagcctgttccgtgccgggcagctcccggccaccgtacagatcgcagccaaggatcggatagcccagcagctggcagtgaatacgcagctgatgggtccgtccggtctccggagtgagcgtcacccgggttaacgccagcgccctctcgccttctcgcgcctgatacaggcggtctatgacccgatagcgcgaacgcgccggtttgccgtggcgggcgcagagcgccatgcgcgggaaacgggccggatctttggcgattgccgcctccactatcccctcatcttccgccagatggccgcacaacagcgccgtatagaccttgtccaccgtgcgctggctgaactgctggcacagcaaggcgttaatgcccttgttgcgggcgatcaccatcaggccggaggtgccgaagtccaggcggtgcaccagggtgcagcccggaaagcgctgtaccagccgatgatgcacggagtcgaggttgcgcggatctttgcccgacaggctcagcagcccggcgggcttattgatcagcagcaggtgttcgtcctgatacaagagggtgatctgttcgcgacacggcggcgcgacaaaggtatcgataatggtggacatcaggcggcccgaagaaggagtggctggcgatagtaccccattttgcccagcggcacgatgctagcgcacaatccgccctcgcggcggcgtcatttatcacccacacttatcgcaaaggcatggcctgtacaggcaatgtgctttacactgcgcgctgcaaaatttgtgttaaccaacgagtaatacggtaatggcgatgaacggaacaatcacaacgtggtttaaagataaaggttttggatttatcaaagatgaaaacggcgaaaatcgttattttcacgtgattaaggtcgccaatcctgatcttatcaagaaagacgcggcggtgactttcgaacctaccaccaacaataaagggctgtcggcctacgcggtgaaggtcattccggaaagcaaatatatctatattgccggcgagcggttgaagctgacctccatcaaatcctatgtggtgtaccgggaagaagagccggtcgagacccgcgtcgataaagaaaacgccgtgctgtcggtcgggctgctgatgaacagcatccggccaaaagccacggtgcagccgggagagatgcgctcggtgaaaaagctggcgatcaccacctttcaggggacaaccctgatcttttcggaagacgaaatcgatatcgatgccacggtaaaactgcttaaggtgtaagccctggcgcgcggtttcccgcgcgcccgaagtcctgcccgatatgctacccgccatcgcccctcgccggacggggcgatggcgccagagagccgataaggatgccgccatgcccgtaaattttgacttcaacgatctctacgcctttcgggccctgatggaatatggcagttttcggctggcggccgaatccatctgcctgtcgcagtcggcccttagccgacgcatcgaaaagctggagacggcgctgggcaaccggctgttcgatcgcaccacccggcgggtgaccctcacgctgtatgggcaaaattttgccgaacgttcggagcaactgctggcccatgtcgagacggtgctggcggatatcagccaggtcagcaaggcgcgcaccgggctggtgacggtggcgacagtgccttccgccgcctactactttatgccggaaatcatccgcagctttcaggcgcgttatccccaggtgcgcatccggttgattgacagcagcgtcgggaatgtgatcgaggcggtcagcagcggacaggctgactttggcctctgctttgccaaaaacctgccagccagtatcgaattcacccctcttgccgacgaccgctatgtggccgcctgtcggcacgatcatccgctggcgcgcaagacgcacctaagctggcaggcgtattttgaacaggattatattggcctggatcgggtctccggcaaccggacgctgcttgaccgggagctggcgcatctgacgccggcgcggccaagcatctgcgaaacccgccacgtcaccacgatgctggggatggtggaagcgggcatcggcattgccgccgtgcccgcgatgtcgatgcccgccggggagcattccgttctccgcgctgtgccgctcaccgacccggtggtcacgcgtacggtaggcctgatccgcctcagcggccgtattcagtcctacgtggcggcagagctggagaagctgattattgaacagtatccttctggctgaccggcgcggcggcggctacgcttcgcataccggtggcgtggatggtctcctgcgccgccggtgacgccagatacgtcagcagcgccttgccttcctgcgggtggtcggcgctgatggtcaccgccccggcaaagcgggtgatgtactgcaggttatccggcagttcgccgacgaaggttacgccgggcaccggcagcagttcgctcacctgctgaaaaccgatcgcataccgtcccttggccacttccgaggccaccggaatgcgctccaccatctgcgctttactctgcatcgcgtcatcaatgcccagggtgtggaacagcgtcgagctgacatagcgtccgctggcgctgtcggagtacgcgaccgatggcgccgccagcagcgtcgcccgcagctggtctgcgctgtggatagccggcagcggcgcccccgccttcaccaccacgccgatcggcgagtcggccagctcccggcgcgaatccggttgcgtacggcccgctttctcgaggctggtcagcgcgtccccgaccatgatcaccacgtccgcgtgttcgccgcgcgccagacggttagggatcgcctgcggcgtttttcccatcgacgggccagggatcaccacgaggtggttgccggtttgtttttcccacgccggggccagcttttccagcgccgctttgaagccgccggagatcatcacggtgacctcagcggacagcgcgctgccgccggtggcggccagcagcagcgtggctagcagggttcctgtcgttttacgcatcatcttctccctgattaacgtgccgtctgcagcgcaacggcgctacggcgatagaggtagcaagtggccagcaggccgcagatggcggcaaagctcatccagtagccgggagacgctttatcaccggtatactcaatcagcgccgtggaaatcaccggcgtgaagccgccaaacaccgcggtcgccaggctgtaggccagcgagaaacctgccacgcgcacttcggcgggcataatttcggtcagcgccgggatcatcgccccgttgtacatgccgtagataaacgacagccacagcagcacgctcagcatcatcaaaaagctcggggcgttcgccagcatggtcagcgcaggccaggcggtagccagcgccagcagggtcatggcgatcagcaccgaccggcggccaaagcggtcggacagcgccccgcccaccggcagccagaagaagttggaaatcgccaccagcagcgtgaccagcaggctgtcagaggcgctgagcatcagcacctttttaccaaaggtcggggcatagacggtgatcaggtagaacgcggtggtggtcatcgccaccatcatcatcccggcgataaccacctgccagttcgccagcagggtggcgaatacctggcgcatcgccagatgatggcggcgggcagtaaactcctgggtctcctccagcttacggcgcaggataaaaatgaacggaacaatcaggcagccgaaaaggaacggaatacgccagccccagtcgctgatagcgctcggctccagtaccgcgttgagggcaaagcccatcgcggctgccaccatgatggcaacctgctgactgcccgactgccagctggtgtaaaagcctttgcggcccggggtggcgatctcggccagatagaccgacaccccgcccagctcggcgccggcggaaaagccctgcagcagacggccgatcagcaccagcagcggcgcccacaggccaatggtctgataagaggggatcagcacgatcaggaaagtgccggtggccatgatcgacagggtgacgatcagccccttgcgccgccccaccttgtcgatataggcgccaagtacgatagcgccgatggggcgcatcaaaaagccggcgccaaagactgcgaaggtcatcatcagcgaggcgaattcactgctcgccggaaaaaaggtatgggcgatgtaggtggcataaaacccgaacaggaaaaagtcgaactgttcgagaaagttaccggacgtgacgcgcagaatggcgccgatccggtcacgggtactcatctgtgaggttgttgaatgcatgcaggtctccagtttgttatccacgcgttgtcgcgcgcctgtcgctgaagactgaaacagaaccgggaacgaaataagcgtaataaacgcatccactaatgcattttacgcatgaataacatttaactaattaacattacttttacatacaatcatttaacacacgccgtcctaaccacgccgcgggtgacggcgaaaaagtcagttttccgttttgtgaccggggccaggatatgtcgccgtgggttgaaggcataaaacctggcctggggtaacgaaataccctgccggctggaaagcgcgtcaggaagcggtggaccccgccaccagcgtctgcaacagggagataagccagcgggtagcctcgcgtttcccgctgcgttggtgggcgtaaatcttgacgtcaaacggcggaaccggaaacggcagcgggaaaatggtcagccgggcggcgcgggccatcgtctccgccgcccgccggggcagcgccatcaacaggtcgctctgctcaataataaagggcgcgctcagcatcgagggggttttcatcgccacctgccgcgaatagccctgtcgctccagctcacagtccagcaccccctgccgctcattccacggggtcaccaccagatgacgggccgcaaggtaggcgtccagggtcagcgccgtccggttggcctggctgatgaccacatattcgtcccgcagccagttaatctcctcaagatcgggatgggctggctcgtcaggggtattgaacccgagggccaggtcgacctcgcccgccagcagctcggtcagcgccgggctgtggggcagataacggagctcaaaccgcagcccgggcgcctcacgctgcaggtgatgcatcagcgtcggaaagacgcagaacgcggtgaaatcggtgatcgcaatctgcatgcagtcggtgctggcggccggcacaaacgccgccggcggcgtcagctcctggttgagaaacttcagcgccgaagcgatagagggcgccagctggctggcatagacgctggggcacatccggtggccttcgcggtagaacagcggatcgttgagggcgctgcgcagccgggaaagcgcatggctcagcgccgaggtgctcatcgccagctcttccgccgccaggcgtaccgagcgggagcgatagaccgcgtcaaagaccggcaacaggttgaggtcaatccggcgcaggacaggatgcataatattcatcgtttgctgatttcattgcacttaattcttttcacaataccgcttatcctcagggtcagcaattttgctctcttttgactatggatacaggacaacccatgagcatcacaatccgccaggccaccccggacgacgccaccgctatctacgacatgatttatgaactcgcggtctacgagaaagcccccaagaggtagtgacgacgccagaggagatcagagagacgctgtttgccagcggcagcaaaaccgaagcgctgatctgcgaggtggcgggcaaagcggtgggctacgcggtgttcttcaccagctactccacctggcttggacgcaatggtatctatatggaggatctgtacgtcacccccgactatcgcgggatcggcgccggaaaagcgctgctgaaaaccatcgcgcaatatgctgtacaacgtcagtgcgggcgtctggagtggagcgtgctcgactggaaccagccggcgattgatttctatctgagcattggcgcgcagccgcaggatgagtgggtgcgttatcgcctcactggcgatgcgctgcgggcctttgcggagtaaagcggctcgccagcaggtcggcgccaggcgtcgacctgctggccgcggatcaggcttcgaccgcgctcttctgcaactgcggaccggccagcgccagacgcgcgcccgcttcggtatcgctgtactgcttgaagttatccataaacagctgagccaggctctcggccttctcctgccatttatccgctgaactccagccattacgcggatccagcaccgcgctgtctacccctggaatgctctgcgggatcgcaagaccgaacaccgggatggtctcctcgcgcagcgggccggtagtgccgttgaggatcgcgctaatgatgctgcgggtatcgcgcagcgacaggcgtttgccctcgccgttccagccggtgttgaccagccaggcttcggcaccggattccgccatcttcgccgccaggacgctggcgtactgggtcgggtgaagcagcaggaacgccgcgccatagcaggcggagaaggtcggcgtcggctgggtaatgccgcgctcggtgcccgccagcttcgaggtgaaacccgacaggaaatggtactgcatctgctcggtggtcagacgggagaccggcggcagaacgccaaacgcatcggcggcaaggaaaatcaccttcgacggatggcccgcgcgggacaccggcttgacgatattgtcgatatgcgacagcggataggagacgcgggtgttttcggttttgctgccgtcggcataatccacgctgccgtcagcgcgcaccaccacgttttccagcagcgcattgcggcggatggcgccataaatctccggctccgcctgcggatcgagattgatggtcttagcgtagcagccgccttcgaagttaaacacgccgtcatcgtcccaaccgtgctcgtcatcgccaatcagctgacgatgcggatcggtcgacagggtggttttcccggtcccggagaggccgaagaacagcgccacgtcccctgcttcgccacggttggccgagcagtgcatcgacgcgatgcctttctgcggcagcaggtagttcatgaccgagaacagccctttcttcatttcgccgccgtaccaggtaccgccgatgagctgaatacgctcgctgagattaaaggcgacaaagttctcggagttcatcccctgcgcctgccagttggcattggtgcagcccgcgccgttgagcaccacgaagtctggcgtaaagctggccagctcgtcggcgcttggcacgataaacatgtttttgacaaagtgggcctgccacgccacctcggtgacgaagcgtacgccaagacgggtgtccgggctggcgccgcaccaggcgtcgatgacgtacagttttttgccgctcagctggcccgcgaccaggcttttcaggctgcgccacacgtctggcgataacggcttattgtcattacggccgaggccggagtctgcccaccagacggtgtcgcgagtctgttcgtcgcggacgatgtatttatcgcgcggcgaacggccggtgaagatcccggtatcaacagccacagcgccagagtcggtcatcacgccgcgggccgcgccggtcagctcaggagaggtttcatgtgcaataagcaaatcgtaatcagggttgtaaaagaattcgccgcttgcattaatccccagctcctgcagagccatttttactgattcaatttgttgtgacatggaactcctgacaaactatttaaggtaagaggcctgggttattcattgctttcgtcatcgtcgccggctatttaataagataagtcctggacaatgaaataaagcaataaataaccgtgagtcgcgatttcatatcgtgctcatgtagggtcgccgatatgcattcataaatctcaactttccaaaaaatgttaacacctgtcgataattatgttaattgcatagtttctatgcgctatgctaaaattgcatagcctttattgcgtttttgaggactggatcggtgttggcaaatctggaagtaaaatggctgtatgatgtgattgcccttgaggagtcgcgcagctttaccctggcggccaaagcccgcaacatctctcagtcttcgttcagtcgacgcatccagtcgctggaggcttccctcggattcagcatcttcgatcgtagcgccaaccctctgcagctgaccaaccgcgggaaaatttttgtcggctatgcgcgaaatatgctcgatgacatggattttcagatcagccgtattaaaggcttaaataacactacccagaaaataagaatcgacgccgccccttcgctgtcggtgttattactgccggagatcatcgccggttacaccgaccgtaaaaataagacttttcatgttgaatcgattaacgtcaacgacgccgtatttaacctgaaagagggaaaaagcgattttatcctctccttctataatgaagaattaatgaactatccgtttattaatcataaaatttttgattcttacctgcacctggtctccccctgcgacgaacatggccgcccgctgtttcatttacatcgcggcgtgctgccgctgatgaaatacgccaacgacagctatatggggcgccaggtgaaccaggtgatcgaccgcacgccggagatcaccttctctctcacctttgtttcttccatgagcgagctgctcaagcgcatgatcctcaatggcgacggcgtgggctggctgccgcaatactctattcagcgcgagctggacgaaggccggctgacgatcctcgatgagagcctgtcgctgccgatcggcgcctggctctaccgctccggctcgcggcttaaccaggccgccgaacgtttctggcagcacattaaaacccgtaacgaaccgcgggaataaccccctcagccgctgatccccagatatgccttacgcacctccgggtcgttgagcagcgtctggccgctaccgctcaggcggatctggccgttcaccatcacgtaggcgcggtccgacaggttgagggcatggcgggcattctgctccaccagaaacagcgtcatcccctgagccgtcagctcgcgcaggatctgaaaaatctgcttcaccaccagcggcgccagccccaggctcggctcatccagcagcagcaggcgcggtcggctcatcagcgcccgggcgatggccagcatctgctgctcgccgccggagagggtcatcgcccgctgtccccgccgctcttccagccgggggaacagctggtacattcgcgccttgtcctcggcctgatagcggttgccaatggcaatggtccccattagcagattttcctcgacggtcatatcgggaaagatgcgccgcccttccggggcctgggcgatgccgttgctggcgataaagtgggtcgacttccggctgatcgcctccccgcgatagaaaatctccccgccggcaatgcgcggctggccgaagaccgacatcagcagcgttgatttaccggcgccgttggcgccgatcagcgccaccgtctccccctcgttgacggtgagggagacctgcttcagggcctggatcggcccgtagaagacatccacctcattaaaggcaagcaaaggctggctcatcggcgcgtctcctcttcctcagcgccaagataggcggcaatcacactggcgttggcctggatcgcctgcggcgcgccgcgggcgatgacgtccccgtgatcgaggacgatgatatgatccgaaatctccatcaccatccccatatcatgctcgatcagtagcaccgtaatgccgtgctgctggcgcagaaagcgaataatccggctcagcgcctgggtttccaccgggttgaggccggcggccggctcgtccagacagatcatctccggacgggtgcacatggcgcgggcgatctccagccgccgctgctgtccgtaggagagggtccccgccagacggttggcgcagtccaccatctccaccacctccagccagtaaaaagcgcgatccagcgcctgactctccgcctgccgatacccacgggtattgaggatcccggccagcagatggcggttgacctgggtatgctgggccaccagcaggttctcgatcaccgacatctcgcggaataaacgtatattctggaaggtgcgcgccaggccagcgcggttcaccagatgggtgccaccgaacatcttgtaatagatccgcctccccagctgcgccgggtggagaaaatcgtccgggtgaagcttctgccccagcacctgaataacatcggtgaccttttcccgcgcccgcagcacgatactgccccccgtcgcccgataaaaaccggtcaggcagttaaacaccgtggtcttgcccgcgccgttggggccgatcagggcggtgatcgacccccgctccacctccagattgacatcattcagcgctttgatgccgccgaaatgcatcatcagatgctcaacgcgtaagatgctgtcggtcatggcgcgactccttttcgcaacgcaaccccgctgcggctggtgcgcaccaggccgcgcggccgccagatcatcatcatcaccatcagcacgccgaacagcagcacccgatattcgtcaaaaccgcgcagcagttccggggtgaccgtcagaacaaacgccgccagtaccactcccagggtggagcccattcccccgagcaccacaatcgccaggatcagcgccgactcaaaaaaggtgaacgacgtcgggttaacaaacccctgatagctggcgaagaacaccccggcgatcccggccgtcgacgcgccgagcataaacgccgagagcttcaccagcacgtgattgagccccatcgcccgacaggcgatctcatcctctcgcagcgcctcccaggcgcggccgatgggcatccgcgtcaggcgatgcttcaccagcagcaccagcatcaccaccaggcacagcacggcgtagagaaagatgaatttcaggttggggttgtagctgacgtggaaaaactcatggatggggatgccgccgtccttggcccggcgggtaaactcgaggccaaacagcgtgggggatggcaccggtacgccgttagggccgccggtgaagctcacccagttgttaagcaccaggcggataatttcgccaaagccgagggtgacgatggccagatagtcgccatgcatacgcagcaccggaaagcccagcaacgccccggcgagagccgccatcaccgcccccagcggcagcatcgcccagaagccaagtcccaggtactggtagcccagcgccaggccgtaggcgccgatggcgtaaaacgccacatagcccagatcgagcaggcccgcgaggcccaccacaatattcaaccccaggccaagcagaacgtagatcagcccaagaatggccacggtcagcagatattttgtggcgagaaacggaaagacaatggccagccccaccagcagcggtattatccagcgcagccgcgagcggtagcccggcggccggacgtacaccccgtcatccgccccctcaaagcgggcaataaaggcttttcccctgtggctctgcagcagcagactgagcgccagcctgccggccatcaccaccgccaccagaatcgccacccgcgcaggcgcgagggtaaaaccataccctttgagcaccacgccgacgatcgggccaaagacaattaacgcgcaaaggccggccagtacgctgtcgatcagcgcgttttggatagcccgcgcaggctggcgcgtaatttcacccataaagcctccttagaccttggccaccagcggacgtcccagcagcccctgcgggcgaaaaatcaggatcgccaccagcagcgcaaaggaaaagacatctttgtaatccgaattcaccagcccggcgaactgggcttcggccaccccaagcagcagaccacccagcatcgcgccaggcagcgagccgatcccgcccagcaccgcggcggtgaaggctttgatgccgataataaatccgatatagaagtcgaaggtgccgtagttcatggtcaccagcacgccggccagaccggccatcgccgcgccgatgacaaacaccagggagatcacccggtcggtattgatgccaaggatcgccgccatgcgccggtcctgctgggtggcgcggcagatgcgccccagccgggtatactgaataatccaggtcaggataagcatccccaccagcgccgcgacgagaataaacaccttggtccaggtgatctgcaccaccccatcgcccaccgtcatgcgcaacgcgccgctaagcagcgtcgggatcccctgctggttcggcccctggctcagctggacatagttctgcaggatcagcgacatcccgatagccgagatcagcggcgccagccgcgtcgagttgcgcagcggccggtaggcgatgcgctcgatcgcccagccgtatacgccggtgaccacgatggtgaacaccagggtggcgaaaatcagcagcggaaaggagtggatcccgaagaaagagagcagcgccaggccgatggcgcacaggtaggcggagaccatatacacctcgccgtgggcgaagttgatcatgccgatgatcccatacaccatggtgtagccgatggcgattaagccgtacactgcgcccagcgtcagcccattgatcagttgttgcagaaaaaacgccgtcatagcccctccagccgccaggcagacggccgccgggttccgttcccggtcaaccgccgtcatgtgacaattcgcaagtcaaaaggacagagcgtcctcaggtcgtggccgatcagagctggtgatatttgcccttgtcgccccactgatagaccacgtagtcggacaccttgaggtcgcctttgccatcccaagctttcttgcccatcaccgtctcgacgtcgtggctcttcagccagtcgctggctttggcgttatcggtaccgacggcgttccaggccgcggcgatagcctgaatagaggcgtaggcgtagagggtataaccttccggctcaaagccgctggcgcggaacttctcgatcaccgctttgccgtccgggagggtgcgcggatcctgaccaaaggtcatcagcacgccgttggtgaactgcggcccaccggcggccgtgaccagctcctcggtgacgatacagtcgccggagaagaatttggcctgcacgccctgctcgcgcatctggcgcaccagcgggcccgcttccggatggcagccgccaaagtagaccacgtccggcttgagggcgccgatcttggtcaccagggcgttaaagtctttttcaccgcgggaaaggccttcgtacaacacttctttggtaccccgcttcgccagcgccgcgcgggtggcatcggccagcccctgaccataggtgtctttatcgtggatgacggcgattttcttcgccttcagcacgtccagcatatagttggcggcgatcgccccctgctgatcgtcacgaccacacatgcggaagagatctttcatgccgcgctcggtgatctgcgggttggtcgagccgggggtaatggtcaggatcccggcttcgtcatatacctcggaggccggcatcgttgaggaagagcaaaagtgccccaccacggcggagactttcgcttcatccaccagccggttggccaccgccaccgcctgcttcggttcgcacgcgtcatccccctgcaccagcacaatcttttcgcctttgatgccgccggcggcattgatatcggccaccgcctgcgaggcccccttccagtactgggcgccgtaggtggcgttggggccggtaaagggcccggcgacgccgatcttcacgtctgcctgggcgtaaaaggccatgctcatacaacctgctatcacaacatgaagcgtcattgttttcagtttcaaagacattcggatattcctcagcgatgtaaagcctggcgtcatggaatgacgcagaaaatatcacttaccgtgtggtgccgacgttggcgcagcgccaggacggccagggtggaagaagcaaaaatcccgccaggaaggagtggaacaccggagaacagtcgccccggtcggtacgcacgcgacggcaacccgtgccgcatccggcaagggcgcattccctttcaggtcaggagatcggttgccatcacgtggcgagccggacaacgcggtatccgtaccggcccgtgagctaaacatagatgcagttagcggtcgctgcgcgccggcgtggtgcaaaaatgcgaatatgatcaacagtggtgattattttgttgcggtaatgtgaagatgataacaggagagcccattaaaggctctcctgtggcccggtggccgctcagagttggctggtgaacgttcgggagatcacatcctgctgctgttcgcgggtcagcgcgttaaagcggaccgcatagccggagacgcggatcgtcagattcggatactgctccgggtgttctatcgcatcgagcagcttttcccggttcagcacattgacgttgagatgctgtcccccctccaccgtctcctcgtggtggaagtagccgtccagcaggcccaccaggttgttttcctgcgctgacggggctttgccgagcgccgccggcacgatggagaaggtatacgagatgccatctttggcgtaggtaaacggcagtttcgccaccgaggtcagcgacgccaccgcccctttccggtcgcgaccatgcatcggattggcccccggagcgaacggcgtccccgcccgacgtccgtccggggtgttgccggttttctggccgtataccacgttggaggtgatggtcaggatcgactgggtcggcaccgcctgacgccaggtggggagcgcctgaattttgcgcataaagcgctccaccaggtcgcaggcaatggcatcgacccgatcgtcgttgttgccgtactgcggatagtcgccttcaatgacaaagtccaccgccagcccgtggtgatcgcgcaccggcttcacccgggcgtactttatcgccgacaacgaatccgccgctaccgacaggccggcgatgccgcaggccatcgtgcggtagacgtcgcggtcgtgcagggccatcagcgccgcctcgtagctgtacttatcatgcatgcaatggatgatgttcagcgcgctgatgtactgcaccgccagccagtccataaagtggtcgaggctggccatcacggtgccgtagtccagcacctcatcgcgcaacggtgcggttttcggccccacctgaatcttcagtttctcatccaccccgccgttaatcgcgtagagcagcgttttggcgagattggcgcgggcgccgaagaactgcatctgcttgccgatcaccatcgggctgacgcagcaggcgatggcgtagtcgtcgctgtgaaaatcgctgcgcatcagatcgtcgttctcatactgcagcgacgaggtggcgatagagacccgggcggcatattttttaaacgccgccggcagcgcttgcgaccagagcacggtcaggttcggctccggcgccgggcccatggtgtgcagagtatgcagatagcggaaggtggttttgctgaccagggtgcgaccatccagccccatgccgcccagcacctccgtcgcccagatgggatccccggagaacagcgaatcaaattccggggtgcgcaggaaacgcaccatgcggatcttcatgatgaagtgatcaatgagctcctgggcctgctcctcattcaataaaccggcgcgcagatcgcgttcgatatagatgtcgaggaaggtggccgtgcgccccagcgacatggcgccgccgttctgcgacttcaccgccgccaggtaggcgaagtagagccactgcaccgcctcccgggcagtgcgcgccgggtgggcgatatcgcagccgtagcgggccgccatctcctgcatctgcagcagcgcgcgccgctgttcggccagctcttcgcgcaggcgcagggtggcctccagcgcctcgccgcgctcaagggccggctgcaggtcggcaaactgcagctcacgttcgcggaccaggtagcgaatgccgtacagcgccacgcgtcggtaatcgccgatgatccgtccgcggccatagccgtccggtagcccggtcagcaccccggatttgcggcagcgcagcatatccggggaatagacgtcaaaaacgccctgattgtgggtcttacgcagcgccgtaaactgatactcaaagtcaggatccatttcgcgaccataggcctcgaaggcgcttttgatcatcttgatgccgccaaaaggatgcagggcgcgcttcagcggctggtccgtttgcaggccgacgatcttttccagcggctggttgatatagcccgccgcgtgggcggtgatggaggtggcgacattggtgtcgaaatccaccggcgcatgggtggcgttctcgacgcggatcccggccatcacctgctcccagagggcggtggtcgctggcgtcgcgttagcgaggaaagactcatcgccctcgtaaggggtgtagttatgctgaataaagtcgcgaacgtcgatctgcgtttgccacgccgtaccgcgaaagccctgccaggcgtcggcgtatcgtacatcctgggtatcgatatctactttcatgaacatcgtctctctacagaataaaaagtcaggccagtgccgccgcggtgtggatccggcctaagcggatcgcatcgagggcaatcatgcgctcttcattggtaggaataaccgcgcagcgcacccggctgccgtcggcggagatcaggcgctcgccggccgaattgggctgctgattgcgggcggcgtccatcgcaaggccaaagaccgccagccgctcgctcaccagccgacggatcagcaccgagttctcgccaatcccgccggtgaaaataatgccgtcgagacgctgcagcgccgcggcgtggccggcaatatggcgggcgatacgatggacaaaggttttaatcgccaggcgggcgcgggcatggccctcatgccacgcctgctccagcacccgcaggtcggaggaaagaccggagatccccagcaggccggaggcggtgttggctacccgctccaggtcgctgagggtctgccgggtttccccggcaatccacgccatggcgccgaagtcgacatcaccgctgcgggtgcccatcatcagcccctccagcggcgtcatccccatcgaggtgtccacgctgcggccgttacgcaccgcgcagatcgaggcgccattgcccaggtgggcgatcaccaggccgctctcctgctccggcaacccgagcagcgccagggcgcgctgggacacatagcggtgcgaggtgccgtggaaaccgtagcggcgtaccccgagattctggtaatactcccacggcagaccatagagaaaagcttccggggccagggtctggtgaaagctggtatcaaagaccgccacctgcatcacctccgggaacagccgctgcgccgaggcgatgccgctgagactggcgtagttatgcagcggggccagggacgatacctggcgaatgttattgataacctcctcgctaataatgaccgactcggtgaacaggtcgccgccgtgggcgacgcggtggccaatcagggccacgctgtcgatgaggtcgcgttgggctaatgccccggcaatcgcctgcagggcgccttcgtagccgcgctgcgccagcgccaccggctcgccgccgttgagcgagagagacgcccgttccgcgttgatgccctcggccacgccgttgagcaggcagtcgcagctggcggcgtccatgacggaaaatttgattgacgacgagccgcagttaatcaccagtactaccggaaattcagtcatgttgtactccgcgtggcctgagctggattagaacagtttgtaagcaatgttgaggatggtcagcagaccgatagcggtcacaaagaggttgtcgagacggccacggtatttggccagcgaaggcgctttacgaatggcgtacatcggcagcaggcacagcagcgaggcgataatcggcgcgcccatggcctcaatcaggtcgaggatattggggttggcatacgccaccacccaggtcgagcccatgatgaacaccatgctcagggtattgagcttgccgctggagacccgggttttatcccctttatagccaaagcgcaggatcagaccgttcagcccttcgagcgtgccgagatagtggccgaaaaacgatttgaagatggccaccagggcgatgatcgacgcgccatactccagcagggtggcaaaggtggatttggtgcccgacatcgaggcaaagtggttcgccagataggagagcaccgggatattctgcgccttggcgtccgccatgttctgcggtgagagggtaaacaggcagctgaaggcgaagaacatcaccaccgccaccatcagcatgctggcccgggagatgatctgtgagcatttgcgttcggtatactcgcggccaaactgcgcttcatactcttcgcgtttggagaccacaaacgaggagacgatcggcgagaagttgaaggagaacaccatgatggagatgcccagccataccgtcaccagaatgccgtcgtgaccggttaaggcgatatcgctgaggttgacctggtcaatcaccgcgctattccagtaggggatcagggacagggagatcaccaccaggctggcgataaacggccacaccagatagctcatcaccttgaccatcaggtctttaccaaaccagatgacaaacgccatcagcagcagcaggagcagcgccaccaccccgcggttgagagccggcatctgcagctggttctcccagaaagtcataaaggtattggtgattgtgacgccataaatccacagcagtgggcagatggcgaagaagtacagaaaggtgatcaccaccccgccggttttgccaaaatgctcttccaccgtttcggtgatattgccggaggggttagcccccgacaggcatagccgggccagcgcccgatggcaataaaaggcgatgggataggccagcaccagcatcaccaggatcgggatcagcccgccgaagccggcgcggatcgggaaaaacagcaccccggcgccgatagcggtgccaaacaggcccagggtccaggtggtgtcagatttacgccaggacgaaaggcttgtctggctggatgcaatgctctcagtcgtactcatatcctgtcctcacttatgtattgaattaagcgtcaacaaaaccggtaatttgcgatacccgggagagatcgatattgcccccggaaatcaggctgaccgttttgcggttctggatatagctgtcgagtttgccgcttaataacgcggcgcaggctaacgccccggccccttcggtgatcactttattgcgctgaattaaggcgaccatgctctggcgaatgtcatcctcactcaccaggacgatgtcatccaccagctggcgggcgatttcataggtcagtttccccgggcgggcgacgtcgcaaccatcggctaaggtgccggcgtggcgatggctggtgatttccccggcataccaggaggcggccatgccgtgaacattctccgactgcacgccgataatgcggattgtcgggttaatggatttaatcgcaatcgcgataccggcaattaagccgccgccgccaatgggcacgatgacattatccacgtcatacagatcttctaatatttcgagtccaatcgtcccctgcccggcgataacctgcgggtcgtcataggggggaataaaaatgcggccctcaagttcaacaatatcgctggctttggcgagggtatcgttaaaattatcgccatgtagcaccacttccgccgaataatcacaggtggcggcaactttcgatttcggcgcccctttcggcatcaccactttcccgtcaatgccgagcatggcgcaggagagcgagacgccctgggcgtggttgcccgctgagcaggccaccacccctttgcgtttttccgccgcggttaaaccgcacagtttattaaaggcgccgcgaattttaaatgaacccgtgcgctgcatattttcgaatttaagaaatatttcgccctggcagcgctcgctaaaataattcgaacggggcatacctgttttatatatttttcccgcgaggcgttgtttcgcttcgagaatatcgtcaatagataccggaagatcgtaggtaatatgcattatggcctctgtatcttaatataaagtcaatgaccgggcgtcatcctgctgataacagcgaggacgtgtgttggattatttaacgactttcagttacgcaataatttgtaatggctgccagtggcggttgccctgccccgaggaatagtgtttcgccatctccaccagcgacgccgcggcggtttttaaccggtaatttttcgaccataccgccgcatagcgcgccaccggcaaggcctctttaatggggatggtgacaaactggctcgagccaaacggcgtggtcatgtcgcaggggatcaccgtcagaaaatcggcattgagcaccaggttatagatcgtcaccaccgaatcggtattaacgatattttcacggcggataccgctgcgctgcagggtggtcagcagttcgctgtagtagcccatattggtctccggcagcacccactgctcgtgctggagcgaggccaggcggacggtgccgttgccgatccgcgcccggttcgccaccagcacaaactcagactcaaacagcggctcgacgtgcaggtcctgcagtttcatctcatcgctcagcgtcccgatggcgaagtcgaggcgcccgtcgcggattgccggcaaaaaggcggagagctgcgcctcatacatcgagacccgcgccttggggaaagtcattttaaactgatgcaccatctccgacataaaggtaaacccgaccagcgaagggaaaccaaaggagacatccaccaccgcgctgttggtcagagcattcatttcattgaccatatttttcatttcacgggtgatcgcttctgaccagttgagaaatacctgcccggcctcggtgagcgagacgccggtatttcgccggacgattaattcgctgccaaaataactctccatgtcgccaataattttactgaccgccggctgagtgagtcctaacgcttttgctccggccccgattgacccgctgcggatcacttcctggaaaactaccagatgctgtgttttaggcagagaaaaagtattcatcacgtctcactttcattcctttgttgacggcggaaagtgtaacaaatcgcaattgccgggttatgtgagagctctcacaaaggctccgccgcggcggataagcaggatccacgagccagaataagtaaagtaaaatcaatatattaaaagcatcatgaacgctatttgcgcgccttttgccgtggccgaatgcggggataaaaataattgatggcgataacatcgacggcgaaatggcgataaaaaatacgccttttgtacgttattcgaccgcgctatcatggtgagaagaaagccgaaaattaaattaatgctgtaaagaataaaaagcagacgtaataaacgccattatttaatgacaagccggtcgggcatcacattttatccccggcggttggggaaaatgcacggtcattatttacaccaaagaaacattaaattcacaatttttcttttgggtcgcgataggcagcgatcttttttccgccatagcacagttggtcatactttgattaaaatcaaccctggtaatttatcttttacgacggccattggagagtcatttgtgttgccgatcacaaatccataaaacaacgacccggcctatcgtgaagagatgatcccgcggctgcgccagcagcttaacgagcagctgatgagcgaccagctggctgtcgacctgctctcttcctatctgcggatggatcttagcgcccagccgtggggccagccgctaaagcccgccccggcgcagatcgctggcccgggcatttcgcctatagctggctgacccccagcgccgcggcttcatcccgccacgccagcagcggcgcataggcctcccgcgacatatcgctatagccgcagatcagcaaggcgtcgcacagggaacgatagcgatcatcgcttaccagctgctggagcgcctcgcgcaggctattcagcgttgccgccggggtggcgccggcggtgatcagcggcagccctggcgcggccgggctccagccgatcgccaccaggccagccagagcctgcggctgatggcgctgcagcagagcgtaggtcacgcagtcgatggcggcgatatcggcgttttcctgctgcagctcgcgcagcgattgccgatggctgccgctgaacatcaccgctgaaaaaaaacgcccctcccgggagagcggcgcgaccattttacgcagtacgttgtagccggactgcgagtgctcggcattgcacaccgcccgacggccaaaaaagtcccccagcatccggtgactatccgcttcgcggaccaccagcaggctgcgatagcggcgcccttcgcaaccgggcgcagcgtagtggaagcagcccaccgtctgcacctccggcaattgggtcaccagcgggtagccacaggtctggctcagcaacagcgtcggctggcgccagtgagccagcagatccccggggtcagccgccggagggtcccccgccaccatcacgccgcgttcgtccagcagcgactgcaccgtctgccacagggcctgggtctgttgacggtggatggcatacatcggaaaggtcatgcgttcagccatgttctcctcccgcctgcgcctgctcgccaaagcccggatgggcgttcaccgctaccgcccggcggctaaaatggcgtcgccactcgccgtacccgcgcaccaggaacccctgattacgctgcagatacgccgcctggcgatgcagatacagttgacgtaaagcgtaccaggggacccctggcagatcatgatgcaccgcatggtagttgagattgaggaacagcgcccgccaggggagcccggcctcgttgatcaccgagcgggccagcgggtcatccgcggcgcggtgttcgagaaaagagcgtactttggtcagggccagcgccgggtagctcaccgccagcacaaaccacagcggagaaaaaccctgcgccgccatccaggtcagcaggcccgtcagcagcaacagatgcagactccacatggcgatagcgcggcggtcgccctcgcggaaagcccgcagcgcgctgttcagggtgtgaataatatccatcatcggcgccagcagcagacgcccccagaaggtgttgcgcaggtggataaggcggcgctgccaggctgagaagcgctgccagctttccgccgttacgtagtacgattcggggtcatcctcagggtgcgtcagcagatggttgcgatggtgcgccaggtggctgtcgcggtagacgccatagggataccagaccgccagcggcagcgtccccaacagctggttaaaccatgccagccgggtgggatgcccatggatcagctcatgctgtaaggacatataccaggcggtaaaccagatcaacagcagcgtggccggaaacagtcccagcgtccgccagcccgccacgcaggcaaaccagccgccgtaaaccgtcacaatcagcagccaggtcggcagctcgctgcgccacagccagctgcgcgccagctggcggatcaggatgcgctgttggtcatccacatagacagccgtcttcttttccgtcacttccgataccttgccgtgttgcctcattcccaccgaagatgtgagataacacgttaaataacaaagtatttaattgacttagctttgccaaaaagcgcgtttgtgttcagcaggacaaagagaataccgtccatggcgcaacaggttggcggtgtttaaaccggtccatcatccggcggcgctgcgcttgccgggcctatgggataacccctccccgggccatccaggccggtgcaggcgcagcgccgccggacaaggacagcggcgtcgcttttgtgccgggcggcggctgcgccttgcccggcctacaatccgtgcggcctgtcgttaatttatttaccgctgttgctgaaattttaccgccaggtcgaggatacttaaggactccagcgccttacccgccttcgcgccgacgataccggcggagcgtcacagcgactactcctcttcccgctccgctggcgtccaggtcggcagagtctggaaggtgtgcaacagcccttcggaccacgccttgcgaatgcggttgaagtagggatcgctgtcggtgatgcgatgctgcccggcactgctgaagctgccgctgcggtagagcagcgtatccagcggcaggccgacggacagattactgcgcagcgtcgagtcaatggagatcaacgcgcagcacatcgcctgctccagcggcgtgtcgatggtcagcacccgatcgatgatcggtttgccgtatttgctttcgccaatctggaaataaggcgtgtcgcgggtggcttcaataaagttgccctccggataaatatggaacagacgatgggtttcgccggcgatctggccgccaagcaacaggttgcagttgaagttggtgttactgcaggtctgctgattgctgctgtcgcgctggatcacctccagcagcgttttaccgatcagcatcgcggcgtcgtagagggaagtgacctgcatcagattcggctcctgctgggtacggatgcgcgcgctgagcaggcttatcacgctctgggtggtggccagattgccggcggattgcagcaccagcacccgttccccctcctgatggaaaacgtgcagctttttaaaagtggcaatatggtcgacgcccgcattggtgcgggagtcggaagcaaacaccagtccatccgccaggcacatggccacacagtaggtcattgcggttattcccgtattattgctgctgcgcctgctggctgtgttcgcgcacttcagcgttagttaacataatctccccgccgccgcccagccgggtgccccgtaccgggcaggcgtcgagataatccagcccggtcgccagccgtaaatgctgattcaggcgacgggtattattggtgatatcaaacgacagccagcggccgtcgagccagacttccgcccaggcatgcatcgccacatgctgggcgttatcgctgtagacatagccgctgacgtagcgcgccgggatctccagcgcgcggcagcaggcgagaaaaacatgggtatgatcctggcacacccccttcgcgcgggcgaaggcgtcggcggcggagtcctgcacctgggtcgcgccgggggagtatggcattcttaacagcagatccgccatcagttgattcagactctcttccgccgcatcgggacgatagaggcgctgggcaaactcacggatcgccgtatcggcgcgggttagcggcgtacagcgcagaaaaaccagcggcgacagcagctcggcctcttcatcacgcgtctcctccccttcgtcggcgatatcgacaatcccgctggcgcggatggtgatctccttgtgcgggttatccagcgtcagcacatgcagcacattgccccagccgtcggtagtggtcaccgccgcgccgtccggcagggtcagcgtccaggcggtgatcgtctgccgggcggtactgcgcggcgtcaggcgcagatactgggtggaaaacttcacttcttcatcgtagccatagcgggtgagatgatcgatgaccagtttcataaggcctccagataggtttgtctgatgctgtcggacagcgcgttaattctcgccagcagcccgttaagggtggtctgcaggtccgcctgcgccaggtcgtcacgggtgctgaagcgcagatcaacgttaagctgatgggcgaggcgcagcggttgataggagcggtcgttagcgatcttctccagctcgcccaccagatcggcaatgctggcgcgcagcgaacgcggaatatcgttgcgcaggatcagcagctccatcaccgtttcgcgactgaccggctggcggtagaggctgttgtaggcttcgcgggcgctgaccgcattgagcagggtatccagccggtagtattcccgcaccgggtccgggtcgttggtcagctgttgatccttaatcagcagcagctgggtggtggcgaaggcgcgctcaatcagggtgccgataccgataaaactcagggcgtcgttgcgcagcagcgtgccgatcactgccccgcgaaacagatgcacccgctctttcacccactcaaaaaagccgtcgctccccagctcgcccagcccctgctggcggagggtccgcagttcaatgcgggtggcattgatgctctcccacacttcggccgacagactgccgcgcaccgcgtgcgcgttgttccacgccatctccacgcagctgtaaatactgcaggggttgttgccatcaagggcaaaaaagttgagcagattgctcatggtaaagcgggcatggcgcgcctgaaacaactcgtgggtcatcgacaaattcagcggtagcgccagatcccgcgactgctggctgtggcgggggatcattgataatttccaggtcacgtccagcacccgggcgtagctctccgcccgctcgagatagcgggccatccagaacagttcactcgccgtacgacttagcatgatgcgtcatcctccatcacccaggtatccttggttccgccgccctgcgacgagttgaccaccagcgacccttcggtgagggccacgcgggtcaggccgccgggcaccagccgcatctcctgcccggacagcacgtagggccgtaaatcgatatgtcgcggcgacagaccttcctcaacgaaggtggggcaggtcgacagcgcaagggtgtcctgggcgatatagttggccggattggccagcaggcgctggcggaaggcctctcgctcctctttagtcgaacgcgggccgaccagcatgccgtagcccccggcgccatggacctccttgaccaccatcagctcgagattgctcagcacgtagcgcaggtcctccgctttccggcactgccaggtggggatattgctgaggatcggctgttcgccgaggtaaaagcggatcatctccgggacgtacggatagatcgatttgtcgtcagccactccggtgccgatggcgttggccagcactacgccgccggcgcgatagacggacagcagccccgggacgccgagcatcgaatcggcgcggaaggccagcgggtcgagccaggcgtcgtcgatgcggcgataaatcacatccacccgccgcggcccctcggtggtgcgcatatacaccgcgccgtttttaataaacagatcggcgctctccaccagctcgacccccatctgctgcgccaggaagctgtgctcgaagtaggcgctgttgaagcgacccggggtcatcaccacgacgcagggatcatccaccagcgagctttcgcgcagggtctgcaggaggtagctcgggtagcgctccaccggcgcaatgtgatgctgctcgaacatctccggatagaggcgcatcatcatcttacggttttcgagcatgtaggagacgccggacggcgtgcgcagattatcctccagcacgtagtactgaccgtcgttattgcgcaccatatcgacgccggtgatatgggcataggtgttgtttggcaggttgatgccctgcatgcacggctgatactgctcgttggccagcacctgctcggccgggatcagccccgcgcgcaggatattctgctcatgatagatgtcatagaggaaggcgttcagcgctttcacccgctggcgtatgccgcggtcaatgcgctgccactccccggcaggtatgatccgcggcacgctatcaaacgggatcagccgctcggtcccctcatcctcgccgtaaacgttaaaggtgatgccgatacggtgaaaaagcagttccgcttgcgcttttttctgccggatagagaattgatcggtgttgcgaaaccattgccaccaggcattatagtgcggccgctgttcaccctgcgcggtcagcatctcgtcataataatgcccgtcaggtagcgtaattttaatcatggctatcccctccggttgtactcactttgtggtaatcccgctaagagataagcattaattatgccaggtcctctgccgccgcggcgttgtgcaaatcggttcagccccgccgtctggttgtgcaaaaaatcgccaaaacagccgcccgcgcccggcggcggctgcaccgtcgtgaggcagggcgacgttttttgcgccatcgtggacgccagcgccctcagccaggcggcccagcccgcggcggtctcaggagacctggcaggtaaatcctctgttttcgcgcaaaatgttacccctgacacgcgcagcggcagatattcgtctaaggtttttggatggccaaacgtcgtggcccgcagtcgataatgataaggagaactccccatgacgagtactgatgcacgtcgtcccgctgctttgccctgttccctgcgcctggcgatcggcggcgctctgatcgccctgatgagcctgaacgctcaggcggaagacggcaaaaccgcgccgcccccctcgccggatattctgctgggcccgctgttcaatgatgtccagagcgcgaagctgtttgccgatcagaaaaccttcgccgacgctatccctaacagcgatccgctgatgatccttgccgattaccggatgcaaaaaaaccaggccagcttcgacctgcgccacttcgtcgaactgaacttcacgctgccgaaagagaacgacacctatgtgccgcccaaagggcaaactctgcgtcaacatatcgatggcctgtggccggtcctgacccgcagcaccgtcgaggtggaaaaatgggactcgctgctgccgctgcctaagccctacgtggtgcccggaggacgtttccgcgaagtctattactgggacagctatttcaccatgctgggtcttgccgaaagcggtcactgggataaagtcgaggatatggtcgccaacttcgccgcggaaattgacgcctggggccatatccccaacggcaaccgcacctattatctcagccgttcgcagccccccttcttctcctttatggtgagcctgctggcgacgcacgatggcgaccaggtgctgaaaacctaccagccgcagctggagaaagagtatcgctactggatggccggagcggacgcgctggctcccggcagcgccgacaaacgggcggtgcggatggcggacggcgcgctgctcaaccgctactgggacgataacgacaccccgcgtcccgagtcctggcttgacgacgtcaaaaccgccaaaagcaacccgaatcgtccggcaaccgagatctatcgcgacctgcgctccgccgccgcctccggctgggatttcagctcccgctggatggacaatccgcagcagctcgccaccattcgcaccacctcgattgtcccggtcgatctcaatgccctgatgttccatctggagaaaaccctcgcccgcgccagcaaggcatccggggacagcgctggcgctacgcagtacgatgcgctggctaacgcccgccagcaggccatcgagaaatacctgtggaatgataaagagggatggtacgccgactacgatctgaaaacccacaaggtgcgcaatcaactgaccgcggcggcgctgttcccgctgtacgttaatgccgcgtcacgcgagcgggcgacgaaagtggccgccgccgccgagtcgcgcctgcttaaacccggcgggctgaccaccaccaccgtcaacagcggccagcagtgggacgctcccaacggctgggcgccgctgcagtgggtggcggtcgaggggctgcaaaactatggtcagcagaagatcgccatggaggttacctggcgcttcctgaccaacgtgcagcatacctatgacagtaagcaaaagctggtggagaagtatgacgtgagttcgaccggcaccggcggcggcggcggggaatatccgctgcaggacggctttggctggaccaacggcgtcaccctgaagatgttggatctgatctgcccgcaggagaaaccctgcgatgcgctgcccgctacccgtccggcgacaaccccttcaccgcaggacaaacctgttgcggcgcccgcggctaacgaccccgcccctgcggaaccgcaaaagaccggctcctgacgctttgccgccccctaccaaaatcggtagggggaagcggtctccctggtcactaccgtcccgtgcagacccattctgcggctcgcgggaaacacttccccaccccctcgcgttgaacaggtcaccttttcgcttgatcgcacaaatacaaacaataataattcgcattactttttaacgaataatgacagattcgtttttcacgcggcggcgtacaggagtaccagaccgcgttggttcaggatgatcttatgaacgtggctatttctcgaaaacgcccggggctgctgtatgcccttgcggtcgcactccccttcaccgcgcaagccgaagagacggtggtggtcactgccaccccgccggcgtccgccagcgcgccgacggagggctacagcgccagcacctcgctcggggcgacgaaaaccgaccaaccgttaatcactaccgcccagtcggtgtcggtggtcacccgccagcagatggcggatcagggggcgaataccatcagccaggcgctggaatataccccgggggtctactccagcttcggcggcggcgccacccggttcgacgccatctccctgcgcggctaccacggcggcgacgtcgataacctgttcctcgacggcatgcgcctgatgagcgacggcggcagccataacgtattgcaaatcgacccgtggtttatcgaacgcgtggatgtgatccgcggcccctcctccgcgctctacgggcagagcgtgccgggcggcgtggtcaacctgacttccaaacgtccgcagttcagtcagcagggccacatccgcctgaccggcggcacgcaaaataccaaaggcgcggccttcgattacaccgacgccatcaatgaccagtgggcatggcggctgatcgggatgacccgcagcagcgacacgcagtatgaccatacccgcgaagagcgctacgcgatttcgccttccctgctgtggcagccggacagcgacacctcgctgctgctgcgcgcctatctgcaaaaagatccttccggcggctaccacggctctttgccgctggacggcacccgctacgcgcacaatggccgtaagctctcccccagcaccaacgaaggcgatccgggagatggctatcagcgccgccagcagatctacagctatgagtttgaccaccagttcaccgacgtctggtcggtctattccgccgggagctacacccataccaacgtctccctcgatcaggtctaccaggtcggctggatagatgacagcgacatgctggcccgcggctacagcggttcgcgcggttcgctggacggctggtcaaccgataaccgcctgcgcgccgatttcaatacaggcgacctggcgcacaccctgatcctcggcgccgaatatcatcgcttccgtaacgacctgtggaccggcgccggcggcgcggcgccccttaacccgtttagcggctataccgcgcagaccggacataccgttacctacagcgacgacaataatcgccgctattaccagaccgggctgtatctgcaggatgagatggtctggaaccgctggcatgtggatgtttccgcccgctacgaccgcatcgtttcccagcaggtcagcgatacccaagggacctcaaaccgccgttcagacgaccatatcagcggccgcgcctcgctgttgtacgccctggacaacggtctgtcgccctacctgagctacagccaggcgatcactccggcgatgctgccgggcgcggacggcaaaccgttgaaaccgaccaccgccgaacaggttgaagccggcctgaagttccagccgccgggcagcagcgatctctatagcatcgcgatttacgacctgacgcaaaaggatgtcgccactcgcgacccgaacatcgccaccgccacctatattccggcgggtaaggtccattcccagggcgttgagctggaagcgcaccaccagatcaccccgcagctgagtactatcgcctcgtatacctggaatcgtctgcgtttccaggacaccaaagacgggaccgacaataacacgccgcagctgaccccggatcagatggcctccttctgggcgcgctatcagttcccggcggggatctccgttggcgccggcgtccgctacatcggtaaacagtgggcggatgatgccaacaccgcgcggctgccgtcggtcacgctgatggacgccatgatgcgggccgacctcagcgtctggtcgccaacgctgaaaggcgcttatgtgcaggttaacgccaacaatatcggcgaccgcgagtatatttccggctgctatggcaccggcaactgttactggggagcagagcgcagcgttatagccaccgtgggctacgatttctgaggacgtggcctccgggagactaccggaggccaaacgagggattacatggcgtccagcgctttctgtagtttccagatatagcgcggcgcctgcggtgccgggtgttttttcaccacatgctcgaagaactcatcggcgtcgagatcgttaatctcctcgatggcgtcctggcggttcgaggagaaggtacgcagcagcgcgccagcgccgttggcataggagaccaccaccgcatagcgcatcacctgcgggtctttgatccccgccagcggaccgttctccagaatgctcagataggcggcccccatcgagatattacgttccgggtttttcagctcactgaccgacggctcgccgcgccaccccatccgccgatagacatcgcgtccggaggtcgacggcttgagctgcatcagcccgacggcgccggatttactcaccaccgcaggattaccacccgactcgatggcgatgatcgccgtgatcagctgcggatccacgccccaggcggcgccggctttttcactgatcggcatccactgcatcgcccgcttcaccgggacctcggggttccacggcgggttagtgtaatcatgtttcgaactacaaccggccagaaaaacgactaaaataagcaaccatctcaatttcacacatctatccttatctacccaaacgccatcatgctacagaacgacggccgcggtacatctcccgcctgccgacaacctgaaggatgacgggtgcggactgaagttagccacctggagatgacaatcgccattccaggcggcatcataaccctttcattcatagcaaggaattatcatgtctcagttttatctggtcgcgccatccgggtattgcatcaaccagcaggcggcagcccgcggcgtcgagcgtctgcagcaggccggacacgaggtggcccaccagcaggtcattccccgccggcagcagcgtttcgccgggactgaacatgaacggctggccgatattaaccagctggcccagttgcccggccgcaaccggatcgtcctcgccgtgcgcggcggctacggcgccagtcgcctgctgccgcatatcgactggcaggggctggttgcccgccagcagcgcgacccgctgctgatttgcggccacagcgatttcaccgctatccagtcgggcctgctggccatgggcaacgtcatcaccttcagcgggccaatgctcgccggcaacttcggcgcggagaccctcgacccgtttaccgagcaccatttctggcaggcgctacgccagccggaattcaccctcgaatggccgggcgaagggccgaactgccgggtggaaggcaccctgtgggggggaaatctggcgatgctgacctcgcttatcggcacgccgtggctgccggcgatccgcgacggcatcctggtggtggaggatatcaacgagcacccgttccgcgtcgagcgcatgctgcttcagctgttgcacagcggcgtgctggcggcgcagaaagcggtgatcttcggcagcttcaccggcagcgcgccgaacgactatgacgcgggatacgatttgccgcaggtctttgattatctgcgccagcagctatccctgccgctgattagcggactggagtttggccacgagcagcgcacggtgaccctgccgctgggcgcccgcgcgcgcctggtgaatcaggcggcggccaccaccctgacgatcggcggccatccggtgctgacagaataaatttcccgaacgcataggcggatcccctgcgaattgttaaaatagtgtcacttttagccattttttcacgccagtcagggagtacgtgaacattggacgccgctgcggtcattagtctgtttattctgggttctgttttagtaacctgcagtatcttattgagctccttttcttcgcgccttggcatcccgattctggtcatctttctggccatcgggatgctggcaggcattgacggcatcggcggcatccccttcgacaactaccccttcgcctatatggtgagtaacctggcgctcgcggtgatcctgctggatggcgggatgcgcacccaggccagctcctttcgcgtcgcgctgtggcccgcgctgtcgctggcgacggttggggtgctgatcacctcggcgctgaccgggatgatggcggcctggttgttcaagctggatctgatcgaaggcctgctgatcggcgccattgtcggctccaccgacgccgcggcggtcttctcgctgctcggcggcaaggggctcaacgagcgcgtcggctcgacgctggagatagagtcaggcagtaacgacccgatggcggtcttcctgaccatcaccctgatcgaaatgatccagcagcaccaaaccggcctcagctggatgttcgccgtgcatatcattcagcagttcggcctcgggatcgccatcggcctcggcggcggctacctgctgctgcagatgattaaccgcatcgtgctgcctgccggcctctatccgctactggcgctgagcggcgggatcatgatttttgccgtcaccacctccctcgacggcagcggtatcctcgccgtctatctctgcggctttttgctgggcaaccggccgatccgcaaccggcacggcatcctgcagaacttcgacggcctggcgtggctggcgcagatcgccatgttcctggtgctgggcctgctggtgacgccctccgacctgctgccgatcgccatcccggcgctgctgctgtcgatgtggatgatattcattgcccggcccctgtcggtgtttgccggcctactgccgtttcgcggctttaacctgcgcgaacgggtgtttatcagctgggttggcctgcgcggcgcggtgcccattattctcgcggtgttcccgatgatggccggcctggacaacgcccgcctgttcttcaatgtcgccttcttcgtggtgctggtgtcgctgctgctgcagggcacttcgctgtcgtgggcggcgaaaaaagccaaagtggtggtgccgcccatcagctggcccatctcccgcgtcgggctggatattcacccggaaaacccgtgggagcagtttgtctaccagctgggggccgataagtggtgcatcggcgcggcgctgcgcgacttgcacatgccaccggagacgcggattgccgcgctgtttcgcaacaatgtcctgctgcaccccaccggcagcacccgcctgcgggaaggcgatatcctgtgcgttattggtcgggagcacgacctgccggcgctgggcaaaatgttcagccagtcgccgccggtggcgctcgatcagcgctttttcggcgacttcattcttgatgctgaggcccgcttcgccgatgtggcgcaaatctacggtctcgacggcggtgaggagttccgcgagcatcagcagtcgctcggggaagtggtgcagcagctgctgggcgccgcgccggtggtgggcgaccaggtggagttcgccgggatggtgtggacggtagctgaaaaagagaacgatcacgtgctgaaggttggggtgcgggtcgcggaagacgaggcggagtgatccgccccggaataggttacagggtcacaactggcacccgcggcgccagggcgcacatcagctcatagccgacggtgccgctgctggccgccacgtcgtcgattttaatctctttgccccacagctcgaccggcgcgccgatcccggcctgcggacaaggcgttaaatcgaccgccagcatatccatcgatacgcgtcccacggtagtggtacgtacgccatccaccagcaccgacgtgccgctcggcgccacccgcgggtagccgtcggcatagccgcaggcgacgatgccgatccgctgctcctgggtggtgcggtacaggccgccatagccaatcgcctcgccgggacgcaggttctgcacgccgatgatctcgctgcgcagcgtcatcaccggcttcagcccggtgttggcgatgtcctgccactgcccggaaggcgacgcgccatacagcacgatgcctggacgaacccagtcaaaatgcgcttccggatgccagagggtcgccgccgagttggccagcgagcgcgggcaatccagcccctccgccgcctgttcgatacggcgcatcggctcgacaattccctgcgggttctccgcctccgcgaagtgcgacatcagcgtcatctcgccgacgttgcttatcgcccgcagctgctgccagacggtgtggacccgctcaggcataaagcccagccggttcatgccgctgttcaccttgagatagatatccagcggcgcgcgcagcttcgcctgttgcagggccttaatctgccagttgctgtggacgctggtggttaaacgatattgatccagcaccgccagctcatcggcatggaagaagccctccagcagcaggatcgggcctttccagccctgctcgcgcagcaggatcgcctcttccaggttgagcaaggcgaaaccatccgccgcgcttaacgcactccatacgcgcgccacgccgtggccgtaggcgttggccttgaccaccgcccacaggcgcgacccgggggccgcgcgacgcactatctgtaaattctgccgcaaggccagcaggtcgatgctggccactaccggacgggtcatgcaagctccttagttgtgtgcgccgtgcaggtgctgcgggcgcgccggggtaaaaccggggctgtagcgggcaacagccagatcgtcgtaagggatcgccggcgtgcggccggagatcagatcgctgataagctgcccggagccgcaggccatggtccagccaagcgtgccgtggccggtgttgagccacagatttttatacgctgtgcggccgaccaccggcgtgccgtccggcgtcatcggccgcaggcccgtccagaacgtcgcctgctccacgtggccgccgcgcgggaacagatcgcgcaccaccatctccagggtttcgcgacgcggctgcagcagcgctttgttaaaaccgacgatctccgccatgccgccgacccgaatgcgctcatcgaagcgggtgatggcgattttgtaagtctcatcaaggatagttgaaaccggcgcgccgtcctcctgagcgatcggaatagtcaatgagtagcctttcagcgggtagaccggtatatccaccagccctttaagcatcgccgtcgagtaggagccgaaggccatcacataggcgtcgcccttaataatctcatcgccgcatttcaccccggcaatgcgatcgccctcgtgcagcagcgcatccactgcggtgttgaagcggaaggtcacgccggcctgttccgccattgccgccagacgggtggtaaacagctggcagtcgccggtttcatcatttggcaggcgcaggccgccggtcagtttgtggctgacctccgccagcgccggctccacctccgccaaccgcttcgcttccagcagctgatacggcacgccggcgtcctccagcaccgcgatgtcgcgggtggcattttcatactgtttggcggtacggaacagctgcagcgtcccgccctggcgcccttcatactgaatgccggtggtgtcgcgcagcgccttcaggcagtcgcggctgtactccgccaggcgcaccatacggcctttgttctccatatagtggcgggtgtcgcagttgcgcagcatctgccacatccacttcaactggaacgaggtgccgtcaagaccgatcgccagcggcgcatggcgctgaaacatccatttgatcgccttcagcggcacccccggcgccgcccagggcgccgcatagccgggagaaatctgcccggcgttggccgcgctggtctcctctgccggaccgggctgacggtcgatgaccgtcacgtcatgacccgcctgactcaaataccacgcgctggctaccccaaccaccccacttcccagtatgacgacacgcatagcgactccgtaacagttaaagaacaatcatctaattacaaattgataactcagttgaaaatattattcaacatacgctttatttatggtgacttaactcacagcaaaccgcaccagccctgcgctgtgagatttacgatctcatgctgcgctttatttttacccagcattaaattctgcaaacaaggcaaaaaaacggctttgagatggggaaatcgcgaagaaaagcgattggcgtacagcacagtttgctgcaccgtgttctatgcttgtttagaggttttccgttcagagaaaaccaacaacaacgagggcgcgctaatggctacgattgactccatgaacagggacaccacccgtttaagcgatggacccgactggacgttcgagttactggaaacctacctggccgaagtggaccgggtcgccaagctctatcgtcttgacacctacccgcaccagatcgaagtcattacttccgagcagatgatggacgcctactccagcgtcggcatgcccatcaactatccgcactggtcgtttggcaaaaaatttattgagaccgagcaggcctataagcacggtcagcagggtctggcgtatgagatagtcatcaactccaacccctgtatcgcctacctgatggaggaaaacaccatcaccatgcaggcgctggtgatggcccatgcctgctacgggcataactcgttttttaaaaataactatctgtttcgcagctggaccgacgccagctcgatcatcgactatctgatctttgcccgtaagtacatcaccgagtgcgaagagcgctatggcgtcgacgaagtagagaaactgctcgactcctgccacgcgctgatgaactacggcgtcgaccgctataaacgtccgcaaaaaatctctctgcaggaggagaaagcgcggcagaaaagccgggaagagtatctgcaaagccaggtgaatatgctgtggcgcaccctgccgaagcgcgaggaagaaaaagcgattgaatccgctcgtcgctatccctccgaaccgcaggagaacctgctgtactttatggagaagaacgccccgctgctcgaaccgtggcagcgcgagatcctgcgcatcgtgcgtaaagtcagccagtatttctacccgcagaaacagacccaggtgatgaacgaggggtgggccaccttctggcactacaccatcctcaaccatctctacgatgaagggaaagtgactgagcgctttatgctggagtttctccacagccataccaacgtggtgttccagccgccgtacaacagtccgtggtacagcgggattaacccctacgcgctgggcttcgccatgttccaggacatcaagcgcatctgtcagtcgcccacggaagaggataagtactggtttcccgatatcgccggttctgactggctggaaacgctgcatttcgccatgcgcgactttaaggatgaaagctttatcagtcagttcctgtcgccgaagatcatgcgcgatttccgcttctttaccgtgctcgacgacgatcacaacaattatctggagatctcggcgattcacaacgaagagggttatcgcgagatccgcaataagctctccgcgcagtataacctcagcaatcttgagccgaacatccaggtgtggaacgttgacctgcgcggcgaccgatcgctgaccttgcgctatgtgccgcacaaccgcgtcccgctggacaaaggccggcgcgaagtgctgaagcatgtgcatcgtctgtgggggttcgatgtgctgctggagcagcagaacgccgacggcagcattgagctgttggaccgctgcccggcgcggccgaacgcgctatagcattgcggggcgagtaaaataacaaagggggccattggcccccttgttctgtatatcgatcgcgaaaagcccgcttaacgcatattcatggctaaatcaccgggcagcgatttctgcatccggtgccagatctcgccactgtcatggccgtagcgacgaaccagctcgtaaacctggtcatgcaggccagcctcacacactttcgccagctgatgatagaaaccgagcgccaggctgcgcgcttccgggctggagaaatagtggcggccgatgcgggtatacaaccccttcatgccgttgaggatcagaccgtagatcgggttgccggaggcaaacgccagaccacggaaaatattataatcaagctcggcgaaggcgtcggcgtgatcctccacctcccgggcgctgtccaggaccgccagcgctttatccggatgctggcgaaacgcggtgcggataaaaatcgtggaaatgttggtgcgcacggagagcagattatcaatcaactgcggtacgctgtcgtgatcgaggcgcgccagcgtttcgaggatattcaggcctgaggtttcccaaaagttattcactttagtgggcttaccatgctgaatggtcagccagccgtcacgggccagacgctgcaatacttcgcgcagggttgtgcgggtgacaccgatcagctcagaaagctcgcgttcagcggggagaatcgatccgggagggaagcggttattccagatactctcaatgatgtactcttccgcgaaacccgcagggctctgcgccttaatgaccatagtaagatttccattacacagcgttacaattgcactcatcataccagagccgctatagcgcagatagcatggcaagtgaattaaaaagggatcgccgtttcattttccgcttttactttgcgcttttccttatcttcacaaaccgccagcacggcgcgaagaaagttgcttctcattttgctcaactggtactcttgccaatcgttatgcacaaaaccatgcactcattgacggggaaggattctgtcgtggaaatttcttatggccgcgcgctgtggcgcaattttcttggccagtcgccggactggtacaagctggcattaatcattttcttaatcgtaaatccgctggtgttcgccgtggcgccgtttgtcgccggctggctgctggtggtcgagtttatctttaccctcgccatggcgctgaagtgctatccgctgctgccgggtggtctgctggctatcgaggcgctgctgatcggcatgaccagcccggcgcacgtgcgggacgagatcgccggcaatctggaggtgctgctcctgctgatgttcatggtggcgggtatctactttatgaaacagcttttgctgttcgtgtttacgcgcctgctgctggggatccgcagcaaaatgctgctatcgctgtccttctgcctggcggccgccttcctctcggcctttctcgatgcgctgacggtggtggcggtagtgatcagcgtcgccgtcgggttctacggcatctatcaccgcgtcgcctcggcgcgcccggacgatagcgacctgctcgatgacagccatatcgagcagcactaccgtgaagtgctggagcagttccgcggctttctgcgcagcctgatgatgcacgccggcgtcgggaccgcgctcggcggcgtcatgaccatggtcggcgagccgcaaaacctgattatcgccaaagccgcgggctggcattttggcgagttctttcttcgcatggcgcccgtgaccctgccggtgatggtctgcggtctgttaacctgtctgctggtcgaaaagtatcgcctgtttggctacggcgaaccgctaccgccgacggtgcgcaaggtgctgcaggagtttgacgatcgcagccgcgcccagcgcagccgtcaggagcgactgcggctgattgcccaggcgctcattggcgtttggctgatcgtggccctggcttttcacctggctgaggtcggcctgattggcctgtcggtgatcatcctcgccaccacctttaccggcgttaccgatgagcacgccattggcaaggcgttcaccgaggcgctgccctttaccgcgctgctgacggtcttcttctccatcgtcgcggttatcatcgatcagcagctgttcacgccggtgatcgagtttgtcctgcaggcctcgccgcacgcgcagctgtcgctgttttatctgttcaacggcctgctgtcgtccatttcggataacgtgtttgtcggcacggtctacatcaacgaagcgaaagcggcgctcgaacatggcgccatcagcctgccccagtttgagatgctggcggtagcgatcaacaccggcaccaacctgccctcggtggccaccccgaacggccaggcggcgtttctcttcctgctgacttccgccctggcgccgcttattaggctctcctatggccgtatggtgtggatggcgctgccctacaccatcgtactgacgctggtcggcctgttatgcgtcgagttcaccctgatgccagtcaccgactggctgctggcgcacggctggctggtgacgcccaccctgccctgagtcagtttttgcccgggttcgcccgggcgcatcaataacccgttacggaatattttccgccgcgcctctggcgtcggttcggttttcgtttacactgccatgatttagcatcttccagggaaatgattatgttgcaatatttaaaccagtgctcaagaggacgcggtgcctggctcctgatggcgttgaccgcttttattctcgaacttgtcgcgctgtggttccagcacgtgatgctgctgcagccgtgtgtcatgtgtatttacgaacgctgcgcgctgttcggcatcatgggcgcgggactggtgggcgccatcgcccccaaaacgccgctgcgctatgtcgccatggcaatctggttgtacagcgcgatacgcggactacagctggcgtgggagcatacgatgatccagctgcacccttcaccgttccagacctgcgatttcgccgcccgcttcccaacctggctgccgctggataaatggctgccgcaggttttcgttgcgtccggagactgttcagtacgtcagtggcagttcctgtcgctggagatgccgcaatggctggtggggattttcgccgcctatctgctggtcgctattctggtgatcgttgctcagcctttcaaagcgaaaaaacgcgatctgtttggtcgttaagccgcggcgagtacagcccacaatgaaacgccctgcggggcgtttttttatgcctcctgcgcatcgctgaatcgtttcatgtctatggttgaccacagccaccaaaaggcgcatattaaatacatcttttaaaaccccacaggagctcacatgtcatctttactgatccccgcagactggaaagttaaacgctccaccccattctttaccaaagagaatgtccctgccgccctgctgagccaccacaacaccgcggctggcgtcttcggccagctgtgcgtcatggagggaacggtgacctattacggttttgccaatgaacaggcgacggagccggagaaaaaagtcgtgattcatgccgggcagtttgctaccagtccgccgcagtactggcaccgcgtcgaactcagtgacgacgcccgcttcaatattcacttctgggtggcggaagaaaccgacggtgaaaacgggctgttccacgcgaagaaagcgtgacggcgcttagcgcgccctgtcaggcagattaaggatatggtcctgccagtcgaccaccgtggactcaggcaccgcaatatggcgaacggagatgcgttcgccgtgcatcgccgcttttgagccagtcagcagcgggtgccaggccggcagaggcttgccttccgccagcaggcgataggcacaggtcggcggcagccattcgaaggtcggcagattttcgcgggtaagcttgatgcagtccggctcatactcaaagcgacgcgcgtagttacgacactggcaggttttgatattgagctgacgacaggcgacgttggtgaagtagatctcgtcagtgtcttcatccatcagcttgtgcaggcagcactggccgcagccgtcacacagcgattcccactccgcgtcgctcatgtcatccagtgttttttgttgccagaaaggttgttcgctcatcggagtgtccgtcgttgccagttaagggtgcaccttataaccagtctggcacgccgatgcaagttttgccgccccaaaaggcggcaaatagcgcttacagcacgcgggtagtgagcgccaggccgttgaagccgacctccagctcgtcaccgctgtgcagcggccccacgccttccggggtgccggtgaggatcacatccccggctttgagggtaaagaagcgcgacatataggcgatcagcggcacaatcttatggatcatgtcggcagtggtgccctgctggcgcacttcgccattaatcttcaggcttaacgacgtattctgcgggtcgccgtggaactcagcggccgggataaagccggagatcggacaggcgttatcgaagcctttggccttctcccagggttgtcccgcttttttcattttcgcctgcaggtcgcgcagcgtgagatccagcgcgacaccatagccggcaatccctttcagcacatgctcttccgtcgcctgacgcagcgtgctgccgataagcaccgccagctcgacttcgtgatgcaccgagcccagcccctcaggaagcaccaacggctgacgaagatcgcacagcgcagtctcaggtttaataaacagcaccggctcttccggcgtcgcactgcccatttccttgatgtgtttcgcataattactgccgacgcacactactttgcttactggataatccagaagcgcaccctgccagttatgatgttggtacattattttccctcgtgggttaatcggattgtttcccctgttccgccaggtgtttctttagtagattttcagacggcggaggcagttgcaggtaatagccctgttcgcttaacgcctgtttcactttttccagatcggcgttaaccagttttttgcgcccatccagcggcagcagcatcgccatttgcggcgtgccaaagctgcgcattagctcgtcaggaacgcgcgagaaatcgtcctttttttcgacgtataaataggtttgttcacgtttagtacttcgatagatcacacaaaacatagttttactcggaattagacccgtggtcacttgcctcaatatatgagtgactataacatgccttttagtcttcggaatatcaccgcacttcggcggttgataaacagcaaattgagtaaggccaggatgtcaaatacgccaatcgaacttaaaggcagtagcttcacgttatctgtcgttcatttgcacgatgcaaatcccgaggttattcgtcaggcgttagaagacaaaatcgcccaggctcccgcctttttacgtcatgctccggtggtggtgaatatcgccagcatcgaggaggaggtagaatggcgcgccatcaacgaggctatcgccgcgaccggtttacgtattatgggcgttagcggatgcaaaattccgcgcctgaaaaccgaaatcgaccgcgccggcatcccgttattaaccgaagggaaagaaaaagcctctcgtccggcaccgtccgaacccaccccgccgccgccagttgctagtcagatcacaaaaacgcgtttgattgatcagccggtacgttccggtcagcgcatttatgcgccacactgtgatcttattgttacaaatcatgtgagtgccggtgcggaacttatcgctgacggaaatatccatgtatatggcatgatgcgaggacgcgcgctggcaggcgccggtggcgacagagacgcccagatattttgtacccaccttgcggcggagctggtctccatcgccggggaatattggctgagcgataacatcccggccgaattttatggcaaagcggcgcgcctgcgtttaggtgaaagcgctttggcaattcaaccgttaaattaatccctttttaacaaggaatttctatggcacgcattattgttgtgacttcgggtaaagggggcgttggcaagaccacctccagcgcggccatcgctacaggtttggcccagaagggaaagaaaaccgtcgttatcgacttcgacatcggcctgcgtaacctcgacctgattatgggctgcgaacgtcgcgtcgtttatgatttcgtcaacgtcattcagggcgatgccacactgaaccaggcgctgattaaagataagcgcacggaaaatctctacattctcccggcttcccagacccgggataaagacgctctgactcgcgaaggcgtcgacaaggttctcgaagaactgaagaaaatggaattcgatttcatcgtctgtgattccccggcaggcattgaaaccggtgcgctgatggcgctttactttgctgatgaagccatcatcaccactaacccggaagtctcctccgttcgcgactccgaccgtatccttggcattctcgcctctaaatcccgccgcgcggaaaatggcgaagagccaatcaaagagcatctgctgctgacccgctacaatccaggccgcgttaataaaggcgatatgctgagcatggaagacgtgctggaaattctgcgcatcaacctggtaggcgtgatcccggaagaccagtcagtcctgcgcgcatccaaccagggtgagccggtgatcctcgatgccgcctcggacgcaggcaaagcctatgccgataccgttgaacgtctgctcggagaagaacgccctttccgcttcattgaagaagagaagaaaggattcctcaaacgcctgttcggaggataaattatggctttactcgacttttttctctcgcgaaaaaagaacacggctaatattgcgaaagaacgcctgcaaatcatcgtcgccgagcgccgccgcggagacgcggagccgcattacctgccgcagttacgcaaagatatcctggaagtgatctgtaaatacgtacagatcgacccggagatggtcagcgtgcagctggagcagcgggacggggatatatccattcttgagctgaacgtgaccctacccgaaacggaagagtcgaaatcctgacctttcgcgccatcgcgaaaaaaaccggctatgccacgcgccgccggttttttaatggtctgaacctggccgcgaactagcgcggatagtcgtttaacagcctcttcagccgctcggccatcagctccccgcgccaaccggaaatcagctcaggttcaccggcttgcgttttcagctgccagtgccagttcagcagctggttgatctgccgacgcgacgccagcagctccgcgcttacgcccttctccgtgctcacttcctgcaccagcgctttaatatctttaaaggctttgcggtagcccggcatgtcgatcaggttctgcagcggcgccggcagggccgactccggcagcgcctgcgctttttcgaccaggctaatcagcgttttgccgtggaagcgaatttcgctaccggataacccgaggctgtcgagctcgcccaggctggtgggcatatagcgcgccacgctccacagatgctcttcccgcaccacaaagtttaccgccaggtcgcgctcgcgcgctttgcgcaggcgccactccgccaacagctgcagacaacccagctggcgggtacgcagctgccaggcgttgccgatatcgcgccaggcctcggccgggtcgaccacctcctgacgacgctgctgcatcacgcggcactcgtcgagcgccgccggcagccagccagcgcgatcggtctccgccattaactggctggcgatcggcagcagataccagacgtcggccgcggcatattcacactgacgctcagtcagcgggcgcgccagccagtcggtgcgggattcgcttttatccagcgctaccccggaatactcttccaccatcgaggcgaagccccaggacattgggcggccgcagaaggccgccaggatctgggtgtcaatcagcggctgcggcatcaggttaaatgcattaaggaagacttctaaatcttcgctgccggcatgcaggtatttagtcacatcctggttgagcagcaggtcgcgcatcggcgcccagtcgttaatcgtcaagggatcgatcagagagacctgctggccgtcgaacagctgcagcaggcccagctgcgggtaataggtgcgggtgcggacaaattccgtatccagagcgacggcggaggccgtgcttgccgcttcgcagacagcgcgcaggccatcgtcggtggtgatcatctgatagttcaaagcatactctcttaacttgcgcccataaaaaacgccggcgtagccggcgtcaggcgactcattcgttacttagcctttattgtccactttagcgcgcgcttcgtcacgcagttctcgccgcaaaattttcccgacgttggatttcggcagttcatcacggaattccaccagcttcggcaccttgtatccggtcaaatggcgacggcagaacgtaatcagcgcctcttcggttaacgcagcatctttcttgactacgaaaatcttcaccgcttcgccgctgctgcctgacggcacgccgatggccgccacttccagcaccccgctatgctgcatgaccacatcttcgatttcgttcggatagacgttaaaacccgacaccaggatcatatcttttttgcgatcgacgatgcgcaggaacccctcttcatccatcaccgcgatatccccggtgtgcagccagccgtctttgataatctcatccgtcgcgtcagggcgctgccagtagcccagcatcacctgcggccctttaatacagagctcgcccggctgacccggcgccacttcgttatcatcatcatccaccagtttggcttcggtggagggcaccggcaggccaatgctgccgctgtggtagtcaatatcgtgcgggttaacgctgaccagcggagaacactctgtcaggccgtagccctccagcagatattgcccggtcagttttacccagcgctcggccaccgcctgctgcaccggcatcccaccgccggcggacaaatgcagcgaggagaaatcaagctgctggaactctttgttgttcagcaaggcgttgaacagggtattgaccccggtcatggcggtaaaaggatacttcgccagctccttcaccagcccggggatatcgcgtgggttggtgatcagcaaattttgcccgcccagttcgataaacagcaggcagttcatggtcagggcgaaaatgtgatacagcggcagcgcggtcaccacgaactctttgccgcgatgcagcagcgggccgtaggtggcattgacctgctcgaggttagccagcatattgcggtgggtgagcatcgcacctttggccacgccggtggtgcccccggtgtactgcagaaacgccagatcttccgcaacgatctccggcttgacgtactgcatgcgatagccgtgctgcaacgcgctgcgaaacgagatggcgtccggcaggtggtacttcggcaccaggcgcttaatgtacttgaccacaaagttcaccagcgtgcctttggcggtggaaagctggtcgcccatgcgcgtcaggatcacatgctggacctgagttttcgccaccactttttccagggtatgggcaaagttggagactatgacgatcgccgccgcgccgctgtcgttgagctgatgctccagttcgcgcggggtatataaggggttgacgttaaccacgatcatcccggcgcgcaggatgccaaacagagccaccggatactgcagcaggttaggcatcatcagggccacgcgatcgcccttctgtaaccccaacccctcctgaagataagcggcgaaggcgcgactacgctcctccagcttacggtaggtcatcacttcacccatattgataaacgccggttggtcggcgtaacgggtggtggcatgttcaaacagttcaaccagggattgatagcggtcaggatttatctccgccggaacatctgcgggataacggtttagccaaacctttttcactgcatcacctctgaaatagttattcgtcgtcatcacagcccctggataatacattttgttaacattatattaactcagcgtaccagtttattaattaggcaatgagcaggttgcgaagcgcgtcactattttttttcttattcgactgaaaacaaagaaacagcggaccggccgctgtttctttgaactaacataaacaacaaaatcattcggttacaacgtttctcacctcagcagggccgggattgtaccagccccagccgccatagccgtagccccaggggcgcggacccagcatccacgggtcgataggttgcggaggcatcaccacctgctgcactacgttccagcgcttgtagccggtggcgttcatcagcataaatttatacggcgtgctgcccaccttgccgtcaaccaccccggcgatcggtccgaccacggtcactagttgaccgcggaaatccaccggatcgaggaagccattgacgtcagcaaaaatccttccgcgggacggctcgcccagcactggccgcgcgccgctgtccagcggtacggtggcgatttctaagcgggttttcccctgctggttttgcacattgaccaccttaccgccaaagcgcgcttcctggccaacgtacagctgcggggcgttcatcacccgcaccaaatcctgctgcggcgtcgggctggtgcctttgatggcatccggcactgacacgcagccgcttagcgcaacggcaaccgccgcggctaacagccagcgaacgccctgtttttgacccgccatgatgcgactccttttctcagtcttcttgttactgagattcactcgcggcctggaagtttcttccacgccacctcgtttcgcaaataaaccggctccgctttctccacggccacggttttccccgccgccagcaggtaacaggctaacggcagcatatcctccgccgccggcaattcaatttcgccgctgcttaaggtcagtccgctcgctttcgccagatccggccacgcctgccatccggtgccgacggtggcccattcgccggaaagctgtgccagtcgttcggctaccgcgtccggtttgagcaccgcttccgtctcttcgccatgccagacgccctgctcgtcgcgctggtactcggcccagtagacttcgcccatacgcgcatcaatggccgccagcacacgggtggcgccggttttgcgccaggcgccctgcgccatggtggccagcgtggaaacgccaatcattggcagttcggcgcccagcgccagcccctgagcgataccgatgccgatgcgcacgccggtaaagctgcccggaccgcggccaaaggccagcgcgtccagctcgctcagcgtggtgccgctctcggtgaggacctcctgcaccagcggcaggatacgttgggtatgttcgcggggacaaatttcgaaatgagcactaagggtgccatcattccacagagccgcggagcaggcctctgtggcggtatcgatagccaaaattcgcatgggtggtcacgctctcgttacatagttcaggccttcaggcagcctgatttccggcaaacggccaacccgccgccatgccgcccgaagtctattgggaaccgctaattaacaaaatggcgcgcagcttaacacattttagtgcggattaccttgccggcggtacggcgagaaagcgcaccgcccgacggatatcgcgggttcgcggcgccggcggcagactggccaggaacaccgcgccgtaggggcgcatcaccagccggttgtcgcagatcaccagcaccccgcggtcgtcgatatcgcggatcaggcgacccaccccctgcttgagggtgatcaccgcatccgggagctgcacttcatcgaagggatcgccgccgcgcagccggcaatcttccatccgcgcttttagcagcggatcgtccggcgaggtgaacggtagcttatcgataatcaccagcgacagcgcgtcgccgcgcacatcgactccctcccagaagctgctggtagccaccagcagcgcgttgccggcgctgacgaactgctgcagcagctggcctttgctggtctcgccctgcagcagcaccggtagcgtcatggtggcgcggaactgctcagccagatcgcgcatcatggcgtgcgaggtgcacaacataaagcagcgaccatcgttggcctcgatcagcggcttgagcatcgccgccaggtgtcgcgccgcgccgggctggttcggcaggggtaggttgcgcggcacgcagagcagcgcctggtgctgatagtcaaagggactcggcagcagtagagtctgcgcctcgtcgatccccagccgggcggtaaagtgatgcagatcgtcgttcaccgacagcgtcgccgaggtaaagatccagctccccgacttctgcgccatcacctctttaaacttctcggccacggtcagcggcgtcagcgcgagagtaaagtggcgcgaggtacactcataccagtagctgtagcccggctggttgatctctttcaaccgcttcaggcgcccgcgatagagggtggcgcgctcaaaagcggcgtcgagcagcgccgagcgacccagcgaaagtttggcgacgtcatagcatagctcgagcgcgtcatcgagcagcagcagcgctcgctgaatgtggctgtccgccagcagctcgcgcagattgccgcggtagcccgggtctcccagctgcaggcggaaatcctgcgcgctttgcgccaggcggtcggcgcatttttgcagctgctgagtgtctttcagttcggtgcggtaggcaatggtgatgtctttcgccaggtccagcagctggcggctggagagcgactggccaaagtactgactggcgatatccggcagctgatgggcttcatcgaagatcatcacttccgcctcggggatcagctcggcaaagccgctctctttgaccaccatatcggccagaaacaggtgatggttgaccaccaccacgtcggcgtccatcgcttttttacgcgccttcaccacgaagcaatctttatacagtgggcagtcgctaccgagacagttatcgttggtgctggtgaccagcggccaggcctgagagtcttccgcgacgctggcgcaggtgctgatatcgccatcctgggtttgattcgaccaggagcgcaggaggatcacatcgctgagggtttgcaccggcagatcgccgcccgccagcgcctgctgctcaagacgttcgagacacaggtagttggagcgccctttgagcagcgccagtttcccggtgaatttgagcgctttggcgacggtgggcagatcgcggctgtaaagctgatcctgcagcgctttcgagccggtggagataatcaccttttttttcgcccgcagcgcaggcgccaggtaagcgtaggttttaccggttccggtccccgcttccaccaccagcggccgggaggcctcaatcgcttcgctgaccgccaccgccatctggcgctgcggctcgcgcggtttaaatcccggtatggctttggctagctggccgtctgctgcaaaatcgtcgatcacattgccccctggttatttggacagtgattatgtcagggaggacggcgtttcgccagtccgggtagtgacgcgagcggcacattatggcagtcttgccgcagccgaatggaatgcttaaagaggaaaagcaatgacaattacgcgtattgatgccgaagcccgttggtcagacgtggtgatccacaaccagaccctgtactacaccggcgtgccggcaaatctcgatgccgacgctttcgagcagaccgccaataccctggcgcagattgacgcggtgctggaaaaacagggcagcgacaagtcgcgtattcttgacgccaccatcttcctcgccgataaaagcgactttgcggcgatgaataaagcctgggacgcgtgggtggtggctggtcacgccccggtgcgctgcacggtggaagcgacgctgatgaacccgcagtataaagttgagatcaaaattatcgccgcggtgtaattactcgtcctcatcctcatcttcaaagcgcgcaacgatctgctcgccggtatgcgttgcgcgcagctcttccgccaccagggcaatcgcctggccgctgcttatcccctgagccattagctcatggatacgttcgaccgctttttgctgttgctcgtggctcagcgaaggtaaacctgcaaacatcttttactcctgctacattgtggggcgtaattatttcacgccgtccccaactacgccagaggggcggcaacgttcaggatcgagaaagatgttgtcccccgcgattattaccctgccctggcgcccggatgcggccgaacactattttgcgccgttaagcgccctgccctgggcgatgctgctgcattccggctttgccgaccatccgcataaccgctttgatattctggtggctgccccgcgcgccacgctactgacgcgcgatgaacagacgtgggtcgacgacggcgaaaccgttgttgtctcagcggaagatccgctgcagctcctgcagcagcagttggatcgtcagccgttcacgccgcaaccccatgacgatctgccgtttctcggcggcgcgctgggattattcggttacgacctgggccgtcgctttgagcgtctcccttcgcacgcgcaggccgatatcgcgctggcggatatggcggtggggatctatgactgggcgcttatcgtcgaccaccagcgccaacagatatcgctgctcagctatgacgacccgcagcagcgtctacagtggctggaggcgcaaacgccgacgccgggtgaaaccttcgccctgacctctgcctggcagtcaaatatgagccgccagcagtacggcgaaaaatttcgccaggtacaggcctatctgcacagcggcgactgctatcaggtcaacctcgcccagcgttttcaggccagctacgtcggtgatgaatggcaggccttccgccagctgaacgccgtcaaccgcgccccctttagcgcctttattcgcctcgatgaaggggcgattttaagcctgtcgccggagcgctttatccagctgcgccagggggagatccagacgcggccgataaaaggcaccctgccgcggctcgattcgccgctggcagatgcgcagcaggctgagaagctggcgaattcgccgaaagatcgcgccgagaatttaatgattgtcgacctgatgcgcaacgacatcggccgcgtcgccgtcccgggcagcgtccgggtccccgagctgttcgtggtggagccgttcccggcggtccatcatctggtcagcaccatcaccgcccgcctgccaatgacgctgcacgccagcgacctgctgcgcgccgcctttcccggcggctcgatcaccggcgcgccgaaagtgcgggcgatggagattatcgatgaactggagccccaacgacgcaacgcctggtgtgggagcattggctacctgagctattgcggcaatatggataccagcatcaccattcgcaccctgacggcatggcagggacagctgtactgctccgccggcggcggaattgtggcggatagcgaggaagcggcggaatatcaggaaacttttgataaagttaatcgtatcctgcagcaactggagaactagaccatggcggatcgcgcccttaatctggatgattttctgtcccgctttcagcttctgcgcccgcagccttcgcgccatgcgctcaatcagcggcaggcggcggtgctggtgccgatcgtgcgccggccgcagcccggcctgctgctgacccagcgttcgccgctgctgcgcaagcacgccggccaggtcgcctttcccggcggcgcagtagataataccgacgcgacgcttatcgccgccgccctgcgcgaagctcaggaagaggtggcgatcccgccggaggcggtcgaggtgatcggcgtcctgccgccggtggacagcgtcaccggctttcaggtgacgccggtggtgggcattattcccccggatctgcactaccacgccagccaggacgaagtctccgcggtatttgaaatgccgctcgccgaagccctgcgccttgggcgctaccatccactcgatatccaccgccggggcaacgaccaccgcgtctggctctcctggtaccagcattattttgtctggggaatgaccgccgggatcattcgcgagctggcgctgcaaattggcgcacgtccttagctatactgataatgagagggcgctctcattattagtaaaatcgcggttagccattagtttaattcatgtgaatagttgaactgacagggcgcttccctcttacactatgcgcagttattacatcgttaccgcacccgcggtaaccctgtcaggagtattatcgtgattagtctattcgacatgttcaaggtggggattggtccctcatcttcccacactgttggcccgatgaaggccggaaaacagttcgtcgatgacctggtcgaaaaaggattgcttaatgcagtgactcgtgtggcggttgacgtctacggttcactgtcattaaccggcaaaggccaccatacggacatcgccattatcatgggactggcgggcaatcagcccgatacggtcgatattgacgcgatcccggcttttatccgtgacgtcgaagcgcgcggtcgtctgctgctggccaacggccagcacgaggtcgacttcccggcggatgacggcatgcgttttcgcagcgacaacctgccgctgcacgaaaacggcatgaccattcacgcctgggccggcgagaaagagatctactgcaagacctactactcgatcggcggcggctttattgtcgacgaagagcacttcggcaaggaaaacgccaacgaactgcaggtgccctacccatttaaatcggcgcaggaaatgctggcctactgcaaagagactggcctgtcgctctccgggatggtgatgcagaacgagctggctctgcacagcaaaaaagagatcgaggattatttcgccaacgtctggcagaccatgcgcgcctgtatcgaccgcgggatgaacaccgagggcgtgctgcctggcccgctgcgcgtaccgcgtcgcgcctcggcgctgcgtcgtctgctggtggccagcgataagctctccagcgatccaatgaacgttgttgactgggtcaatatgttcgcgctggcggtcaatgaagagaacgccgcaggcggtcgcgtggtaaccgcgccgaccaacggcgcctgcggcatcgttccggcggtactcgcctattacgatcactttatcgagtccgtcagcccggagatctatattcgctactttatggcctgcggggcgatcggcgcgctgtataagatgaatgcgtccatttccggcgcggaagtcggctgtcagggcgaggtgggcgtcgcctgctcgatggcggcggcgggcctggctgaactgctcggcgccagcccggaacaggtttgcgtggcagcggagatcggcatggaacacaacctcggcctgacctgtgatccggtcgccggtcaggtgcaggtgccatgcattgaacgtaacgccatcgcctccgtcaaggcgatcaacgccgcgcgaatggcgatgcgccgcaccagcgaaccgcgcgtctcgctcgataaggtgatcgagaccatgtatgaaaccggtaaagacatgaacgccaagtaccgcgaaacctcgcgcggcggcctggcgattaaagttcagtgtgactaaacttttcgtgcccctctgcgcctgcaaagcgcgcagggggttaaccctggtgactgaaatctccctgatgcgccttcaacggcgcattttcttttttctatacctggcgatattctgccactacacttgctctataaaataagccacgcttaaccactcgtcctgtcgacagggtgtcgcacatgcagactgcacaaaaagtcattacggcctatcgtcacaaacgcattattgtctgcctgctggtagccctggcgaccctgggcgccacattagccatccgatttatttcgcagcgcagcgtaaatgaagattatattcgcacggccgccagccaacgggtggcggcgctcaatgacatcttgcgcccgctaagcgcacagcgagccaccctgctccctctggtgggcaaaccctgccctgatatccatctgacgctgcgcaaaatggcggcctcgttgcaaaccattcgttccgtcgccctcgtcacgtcaggtatcgtttactgttccagtatttttggcccgcgacaggcagacttacatcgcctgcagcccgcgcttcctgcgccccgccctctgctgctcttctcgaacgacagctccttgctcaaaggctcgccggtactgatccaatggtatccagccgcggagagcggcctggacggcgtgatgctggtggtgaatattgagctgctgggaaccttaattcttaatgaaaaatcggccctgatcagcgacgtcagcctgcaggttggcgatcgttattttagcagccgccatgggcttctcgaaaaagcgcatgtcccgcagggcacggtgatttatcgccagcgctctacggagtttccgtttactgtcaatattaacggccctggcgcctcggcgattgcgcttgaggagctgcccggcgagctgccgctggcgctgatttttagcctgctaatgaccggcatcgcctggctggccaccgccggcagaatgagtttctcgcgggaaataagccttggcatttcggcccgggagtttgccctctggtgccagccgctgcaggatgcgcgcagcggccgctgctgcggggtggagatcctgctgcgctggaataatccccgccgtgggacgatttcgccggaggtatttatccccatcgccgaaggcaataatctgatcatccctctcacccgctatgtgattgccgaaaccgctcgccgcctggacgcttttcctcgcgaccgccattttcacatcgcgatcaatgtcgccgcgcgccatttcgctaacggactcctgctgcgcgacctgcacaattactggttcagcgtggatccggtgcagcagctggtggtcgagctaaccgaacgcgatgtcctgcaggatggcgaccagcatatggccgaacatctgcactttaagggcgtacagctggcgatcgatgattttggtaccggcaatacttcgctctcatggctggaaaagctgcgcccggatgttttgaagatcgaccgctcgttcaccagctcggtcggcatagatagcgtgaacgcgacggtgacagatattattatcgccctcgccaaccgcctgcatattgttaccgttgccgaaggggtggagacgctggagcaggaaaactacctgcgtagccacggcgtcgatgtgctgcaggggttttattatgcgcggccgatgccggtggaggcgttcccggcgtggctggccagcagggaggagagtgagagtgagagtgagagcgagacgacagaataactcgccggccgcagcggccggcgagcctggcgattactcttcttcgtcgctcggcggacgagtgaccaccgcgcgcaccagatcgacccggtaatcattcgcttccactacggtaaaatgcagcggcggaagcgacacgacgtcgccaatgcgcgggatatgaccattggcggagatcaccagcccggcaacggtggcaatatcctcatcgtcattgatcagtggatccagccccagcgcctgctgcagcgcatgcaggtcggtcgaccccttaataagccagccatcgccatcgatgacaatctctggcgtctcatcagcgtccgggaattcaccggcgatggcttcaaggacgtccagcggcgtgaccagcccctgcaccacgccaaattcattagttacgatgacgaagctgccgcgcgcccgacgcaggaccccgagcagattgatcgggtccagcgtttccggaacgacaattgccggggaggcagaagccagcgccgcgacgttttcccccgactccagggccaccagcatctctttcgcccgcacgataccaatgatttcatccagctctccgcggcagaccgggaagaggctgtgcggcgacgacagcagttgacgacgaatttcatcttcactctgctcagcgtcgacccagctgatttctccgcgcggggtcatgatgctgcgcagggagcgctgggccagggtcagcacgccgttaatcatgtagcgctcttcttccgcaaaggcgccctcaggaacgggcaccgcggctggactgtccgcgtcatggctgacggaggcctgtttgcggccgcccatcaggcgcaggatggcatccgcggtccgagcgcgcagcggcagcgtcgactggtggcgaacaaagttacggcgcgccacctggttaaagaactcgataatgatcgagaaaccgatcgccgcgtacagataccctttcggaatatggaagccaaacccttccgccaccaggctcaggccaatcatcaacaggaagctcagacagagcacgaccaccgtcgggtgctggttgacaaagcgcgtcaacggcttggaggccagcagcatcaagatcatcgcgatcaccaccgccgccatcatcaccggcagatggttaaccatcccgaccgccgtgatcacggcgtccagggagaagacggcatccagcaccactatctgcaatactactacccagaaactggcatagcctttaccgtgaccggcatcgtgctggcggttttccagccgttcatgcagctcggttgtcgccttaaacaataagaagatcccgccgagcagcatgatgagatcgcgcccggaaaaggagaaatcggcgatggtaatcagtggtttcgtcagcgtcaccatccaggagatgaccgacagcagccccaggcgcatcaccagcgccagtgacaggccgatcagacgcgctttatcgcgctgcttcggcggcagtttgtccgccaggatggcaataaacaccaggttgtcgataccgagcacaatttccagaacgataagcgtcaacaggccggcccagattgagggatccattaacaattccatgtacgactccggtttgcggcaaggtcagtcatcgccatgccatgcaggggcgcgacaccaggtgctgaaagaaatgcgggatacgtagaggtggcaatcagatgccagaaagtgaaaagacgtcgatgacggtccatactgcgggctatgccctatactcctgagtaattaaacggaagttaaacatagcaaaatatagatcgaaattggaaataatttacctgaatttgcaataactaaggctattttttgcgctgcaaaattattcgcagacgatacgtgattaacggatcttcatcacattaattattttttcactgtctaaaataattcgcggtagtaactattttctatcttacaccctaactgaatcgattttgtcctcaagagtgattcaggatgtatcaaagcagatgatgcattcacgataataaaggaggtagcaagtgacgattgctattgtaataggcacacatggttgggctgcagaacagctgctgaaaacagcagaaatgctgttgggcgagcaggaaaacgttggctggatcgatttcgttccgggtgaaaatgccgaaacgttgatcgagaaatacaacgcccagttggcaaaactggataccagtaaaggcgtgctatttctcgtcgatacatggggaggcagccctttcaacgctgcgagccgcattgtcgtcgataaagagcattacgaagttatcgccggcgtcaatatcccgatgctggtggaaaccttcatggcccgcgacgacgatccttcctttgatgaactggtcgccttagcggttgaaaccggcagcgaaggcgtgaaagcgcttaaagccaaaccggtggaaaaagcggcccctgcgcccgcgcctgccgcagcgccaaaagccgccgcaccggccaaacccatgggcccgaacgactacatggtaattggccttgcgcgtatagacgaccgtctgatccatggtcaggtcgccacccgctggaccaaagagaccaacgttacccgcatcatcgttgtcagtgatgaagtggccgcggataccgtgcgtaaaactctgctgacccaggttgcgccgccgggcgtcaccgctcacgtggtggatgtggccaaaatgatccgcgtctacaacaaccccaagtatgccggacagcgcgttatgctgctgtttactaacccgaccgacgttgaacgtatcgtcgagggcggcgtgaaaatcaccagcgtcaacatcggcggtatggcgttccgccagggtaaaacccaggttaacaacgcgatttcagtcgatgccaaagatattgaggcgtttaaaaagctgaacgcccgcggtatcgagctggaggcacgtaaagtgtccaccgacccgaaactgaaaatgatggatctgatcgctaaggttgataaataacccggcggatcgcgccccagttttcactttaagacttaatcaacaggagaagtacaatggagattacccttcttcagattgtgctggtgttcatcgtcgcgtgtattgcgggtatggagtcggtacttgatgaatttcagttccaccgtcctctgatcgcctgtacgctgatcggcgccgttctcggcgatatgaaaaccggtattatcatcggcggtacgctggagatgatagccctgggctggatgaacatcggtgcggcggtagcccctgatgccgcgctggcgtccattatttccaccgtcctggttattgccggccatcagagcatcggcgccggtatcgcgctggctatcccgctggcggcggcaggccaggtgctgaccatcatcgtgcgcaccatcaccgtggccttccagcacgcggcggataaagcggcggagaatggcaacctgaccgccctgtcgtggctgcacgtctcgtccctgttcctgcaggcgatgcgtatcgctatcccggccgttatcgtggcgatttccgtcggcaccagcgaagttcagggcctgctgaatgctatcccggaagtggtcaccagcggtctgaacatcgccggcggtatgatcgtggttgtcggttatgcaatggtcatcaacatgatgcgcgcaggctatctgatgccgttcttctacctcggcttcgtcaccgccgccttcaccaacttcaacctggtggccctgggtgtgattggtgcggtcatggcaatcctctacatccagctgagcccgaaatataaccgcgtcgccggtgcgccggctcaggcggctggtaacaacgatctcgataacgaactggactaacaggtgagcgaaatggttgatatgactaaaaataccaccgagaaaaaactcacacagagtgatattcgtggcgtgttcattcgttctaacctgttccagggttcatggaacttcgaacgtatgcaggcgctggggttctgcttctctatggttccggcgattcgtcgtctgtacccggagaacaacgatgcgcgtaagcaggcgattaagcgtcaccttgagtttttcaacacccacccttacgttgccgctccggtactgggcgtaacgctggcgatggaagagcagcgcgccaatggcgcagagattgacgatggcgctatcaacggcatcaaagtcggtctgatgggaccgctggccggcgttggcgacccgatcttctggggtaccgtgcgtccggtgtttgcagccttaggcgccgggatcgcgatgagcggtagcctgctcggtcctctgctgttctttatcctgttcaacgcggtgcgtctgctgacccgttactacggcgtcgcctatggttatcgcaaaggcgtggatatcgttaaagatatgggcggcggcttcctgcagaaactgactgagggggcgtcaatcctcggcctgtttgtcatgggggcgctggttaacaagtggacgcatgtgaacattccgatggtggtgtcaaaaatcaccggctctgacggacaggttcacgtcaccacggtgcagactatccttgatcagctgatgccgggtctggtgccgctgctgttgaccttcgcctgtatgtggctgctgcgtaagaaagttaacccgctgtggatcatcgttggcttcttcgtcatcggtatcgccggctacgcggtcggcctgctgggtctgtaatttccaggctgtacgccgggggcttgcccccggcttttttttatcaggagaaacgcaaagcaatgaccttcacggacctggtgatcatcctgtttatccttgcgctactggcctacgcgatatatgaccagtttattatgccgaggcgaaacggcccggtactgctggccatccccctgcttcgccgcagtcgcgttgacggcatgatctttgtcggcctcaccgccattctgatctataacaacatcacccagcacggcacggcgatcaccacctggctattatcagcgctggcgctgatggggctctatttattctggatccgtacgccgaaaatcatttttaaaccgcacggctttttcttcgccaacgtgtggatagaatatcagcggattaaagagatgaatttatccgaggacggtgtgctggtgatgcaattagagcaacggcggctgctgatacgcgtacgaaatatcgacgatctggagaagatatacaaacttctcattacaactcaatgacttaaaaatatagccagcgctatattattcccgttagcagcggagaaatattatagccacggctatatttcccgcctaaccttatcttttttattaactattttttcacttataaatttaaatgaaaatcgttatcatttggttattaaaatagccctcttctgttattgttttatattctaaaaatatgttaaggttgcgcccgtcgttggggagtagccgatttcctgcccgccaggaaatgtacgtgtcaacatactcgttgcaaaacgtggcacgtacgggttgaagagattcaatcaggcgagaccatagatacatcactgctgtacgtattgctcagccattgagcggctccgcgtatgtttactgggggcagcgatgtgtcatatggattatccccggtcaggacacgcacatgaatttatccgctaccattcttctcgctttcggcatgtccatggacgccttcgcagcctccatcggcaaaggcgccaccctgcataaacccaaattttcagaggcagtacgcaccgggctgatttttggcgccattgaaaccctgacaccgctggtcggctgggggcttggcatgctggccagccagtttatcctcgagtggaatcactggattgcctttattttactggtgtttctcggcgggcgaatgatcgtcgaaggttttcgcggcgacagcgacgaggcgtgcgaggcgcctcaccgacatggtttctggcttctggtcaccaccgccttcgccaccagccttgacgcgatggccgtcggcgtcggtctggccttcctgcaggtcagcattgtgaccaccgcgctggcgatcggctgcgccacctttatcatgtcgacgctggggatgatggtcggtcgctttatcggcccgctgcttggcaaacgagccgaaattctcggcggtatcgtgctgattggcatcggcagcgaaatcctctggagccatttcgccggttaagctttacgcttcgcgctgccagcagtggatcataaaatcggtctggcaaccaaaggtcggctgctgacgcagcgcggcgtgcacttcggctttagcccgccatgcgaacggcgtcatctgcagcagggcctgcgcttcacttcccgtcaggatcatcggataagccagctgctgctgagcctccaggcggaaccccggcatcgcttccgtcttcagctcatgcaggcgaacttcatcgtaaataagccctttcagctccagtaagtgacggggacccggcgtggcggtgatcacccaaccaccgggacgcaccacccgcgccagctcttcggcgttgcagggcgcgtaaatgcgcaccaccgcgtcgaagctagcgtcggaaaatggcaggcgctggctggaggccacgcaaaaattcacctgcgggtagcgttttgccgccgcgcggatcgccggcttcgacacgtccagcccccagctgcggctggcgatggcggcaaacgcgtgggtgtaatacccctcgccacagccgatatccagtaaatccgtaggggcgtaatgtcgcagccgctcagcgatagcatcccgtagcggctgataatgtccggcgtcgaggaacgcccgccgggcctgcatcatttcggcgctatcgccgggatcgcgcgaccgcttgaactgcaccggtagcagattgacgtacccctctttcgccagatcgaactggtgccgctgcgggcaggaatagtggttgtcgctacggctgagcggcgcgtgacaaagggggcaactgtatgacatgacggctccggtgttgctgaaagggcgaaagtgtagcgctattcgcccctgcagaccactgttacagcgccggcccctgtgggtggctatcgtgcattacgatcagattctccgccccttgcggcatgccgtccggcatgacgttctccagccgcaggacatcgcccatgatctggctgaagaccggcgcggacacagcgccgccgtaataggaaccattgctcggatcgttcatcaccaccaccagcgcgaactgtggtcgactggcgggcgccacgccggcggtataggccacatacttatcgatatatttgccgtccgggccaattttcttcgccgtgccggtttttaccgccacccggtagtcgcgtaccgccgctttggtaccgcccccgcccgggagcgccacgctctccatcatatgttccacgctatgcacaatactctccggcatcacccgcgtgcccatcaccggcggatcgatgcgggtaatcgacagtggtcgcgcaatgccgaagccgccgatggtggcgtagacgtgggcgagctggagcggggtgaccatcaaaccatagccgaaggcgaaggtggcgcgatccagttgcccccagtagcggcgatgcggcatcagcccggcgctttcgccggtcaaccccagccccgtcggttcgccaaagccgaaagctttataggtatcgatcagatgctgcaccggcatggcgagcgagagatgggacacgccggtatcgctggatttctgcaggatcccggtcaggctcagctccggataatagcccacatcgcgaatacgatggccatcgaggacgaacggatgggtatccaccacgctgtctggctggacaatcccctgctgtagcgcagtcatgatcaccagcggtttgaccgtcgacccgggctcgaaggtgtcgctgatggcccggttgcgaaaatcatccagcgtcgcgctatcgcgattgttcggattgaagtccggatagctggccatcgccaggatctcgccggtatcaattttgatcaataccgccgccccggactctgctttgttccagcggacggcgttgtcgagggcgtcttccgtcaccgtctgcaggcgttcatcaatactcagctgcagattatgcgccggtaccggcggcacttcggtaatgttctcaatgacattaccatgtttatctttacgcaccagacgtcgcccgggtttaccggtcaactgggcgttaaagcttttctccaccccttcgatgccctgattatcaacattggtaaagcccagcagattggcagccacgtggcccgccgggtagaaccgtcgcgattcatcgcgcaggtagacgcccggcagatgcagtttatcaatccactctgcctgctcgggattgatctgacgcgccagatagagaaagcgagcgtggggatgactctgtacccgctgggccagctctccgaggttgaggtgcagcgcttcggccatcgcctgccagcggggcccatagcccacaccgcccttctccatagtggtctgcgggtcgatccagatagcactgaccggaacgctcaccgccagcggccgtccttcccggtcgctgatcatcccccgctcaaccgctacgggttcttcgcgcagggagcgcatatcttcttgttttaccaggttatcgggggagataatttgtagccagcccacgcggaccagcagcagccccagacaaccgagaatggccacacacagtaacccgaagcgaatcggggtgaaactggcggcggacttcgtttttttctttagcaccatagctccggcattgttttgcaaccaactgatttaacagaaaattagcaaaacagactgctacacaatgctaataaagatgagtatttgcaacaagacgcgacgggagggggaaaaatgacatgctttgcaataaaaatgcaaaagccccgcgcaggcgaggcttttatacaagaagagtggtcttgtatcagatagcagttacgttaactgcagccggacctttctggccgtcctgaatttcgaactcaacgttctggccttcagccagagttttgaagccgttaccctggatagcggagaagtgtacgaacacgtctttgctgccatcagccggagtaatgaagccaaaacctttagactcgttgaaccacttaacttgacctttaatctttgccatttgcaaaattccttagactgttttcttcgcctgctggcgtttacctagataaaactgacacataactgcatgaggcactaatttaaggttcggcagagaagcggtattcaacgacaacgtgtttactcaggacttctttactgaaaatgccacacataaacagaactgtacctcgtttaacccgaaacgtgttatcacacactacgtaaataatggcaagccatttttaaacgtgtctcgatcgttcgcacaaattataaggtaatcatttgatcgcctgcacatttatgcgtctttgccgcccctggcaaggcgctacagcatcagccaatatcgcccattcgttgcctcattactgcaacttttttaccatagctcaacaacttcgcttcgtccaggtatgtccgtacacgaactgctgtaatgtaagcgtctggtgggcaacggtgaatattgatgcgcataattcgttataactccagactaaaaatcgctaagccgtgccagtgtagtgataataaaacctgttagtcgtcacgctaaaaatagtgctaattctgcaccttaataatgaaaaaaagatgacagtgtcacgttacccaacaataaacgcggcgagaatgactttatttacagcgtgtaataaagaggatattgcactaagaaaggaataatggaataagaataagatattaccgcccgctatcatgcaggtgcgcatcttatgatgcacacctgtcgggcgccttaacgttcagctaccaggcggataaactcatcctcccctttcgccttgccggcgacggtcggctcagccacatcctctttctctggcgcattagcttcgcacaggcgacgtaacagcgcattctgccgcttttgctgatccagcagcgcttgcagcagctctatctgctcattcgcccgcgaactggcgcggttgacgaagaaccataacaacagaccgacaagcagcagcgccacggacacagccagcgatgccagatttaaaatcccaggatttagtaactcactcatttcaccacctcaaagagaaggcgttcattctaccacccgcggcgcagaaggaaatcagtcggcagaaaaatgtcttaccacggaataaatttattaatagtgcaaatgccgctgaaaaactgaacatcctggtcgcacattacgttaagcatctgagtccacagcaacaggcagcctgctatgatgactatcagaaaacccaccgtaattttttcactccactctccgcatcagtacgcaatgtcgccaggatagcacggccttcttaaaccgcggctaactgtattacgaaaggtaagtttaggaatcatcgacttgtttcaaaacgtgttcgtgtcaaaatcacgccagggatcatacaaataatgaggcatcaatgcgattaatcattcgtactattatcttggtggctatcttatggattggcgtattattgagcggttatggggtgttattccacagtgaggaaaacgtcggcggtctgggtcttaagtgccaatacctcaccgcccgcggagtcagcaccgcactttatgttcattccgacagcggagtgatcggcgtcagcagttgccctctgctgcgtaaaagcacaaccgtggttgataacggctaacatcgaaccggcgatcgcgacgtagcgccgcggtcgccaacccggtatccgccgcctcagaacggatagtcgttgtatcccatttgttcagaaatcttacgcgccgcctgatggagcatcgccacgtattcatgcaagcgttcttcagagaaacgtagcgttgggaaagagatgctcagcccggcgatgaccacgccgaaacggtcaaacaccggcacgccaatgcagcgcagcccctcttcctgttcctcattatcctcgccatagccctgctcgcgaacgccatccagcacttttagcaactcctcggtgctggtaatggtccgctcggtgctgcgcttatactccacgccgtcgaggatctgctccacttcgctgcgatcgcgccatgccagcagcaccttgccaatcgcggtactgtacagcgggttgcggcggccaatacgcgagtacatccgcaggttatacatcgagtcaattttatggatgtagacgatactgtcttcatccagcgccccaagatggatggtctctttcgtcagtcgcgaaagttcgcgcatctgaatatcggcgctgcgcaccaggtcgacgttctgcagcgcgcgcgcgcccagttcgaacagcttgagggtgagagagtatttctcagactctccttcctgtgccacatagcccagtgatttcatggtctgtaaaaagcgataaacggtgcttttcgacatcatgacgcgctgggacagttcggtaatgccaatttcacgctcttcacccagcgcctgtaggatgccgaaaaccttcaataccgaagagacagaatctggctgtttatccaaatctgcacctgccatttatcacctcgtcgtaactgttttataaaaattagaaccggtttttattataaattcgccgcctctgagccgcaatcattcttctgccacttcgttacaaatctgcgacatactgcgaattaatcaatgctaaactcatcattcaaaaaaccgtttcatttaagactcatattcaccatggataaaaattcttctgatggcgtgccgttgccgcaacgctatggcgccattctgaccatcgtgcttgggctgaccatggccgtgctcgacggggctatcgccaacgtcgcgctgccgactatcgccagcgatctcaacgcctcaccggcggcttcaatctggatcgttaacgcctaccaaatcgccattgtcatcgccctgctgccgctctccttcctcggcgacatggtcggctatcggcgtatctataagataggcctggtggtgtttatctttacctcgctggcctgcgcgctgtcgcgtagcctcgaaatgctaaccttcgcccgcgtcgcgcagggattgggcggcgccgcgctgatgagcgtcaacaccgcgctgatccgtctgatttatccgcagcgctttcttggtcgcggcatgggcattaactcctttgtcgttgccgtctcttcggcggcaggcccgactatcgccgcagcgatcctctccctcgcctcatggcaatggctgtttttaattaacgtgcctctcggcatcgtcgcctttgttctggccatgcgctttctgccgcccaacagcgcgcgcagcaaaatcatccgcttcgatctgccgagcgccattatgaacgcccttaccttcgggctgctgatcaccgccctgagcggtttcgcccaggggcagtccactcagctggtgctggcggaggtcgccgctatgctggtggtggggttcttcttcgttcgccgccagctcacgatgcccgtccccctgctgccggtcgacctgctgcgtatcccactcttttctctctctatctgcacttccatctgctccttctgcgcgcagatgctggcgatggtctctctgcccttttttctgcagtcgatgatggggcgcagcgaagtggagaccggtctactgctaacgccgtggccgttagcgaccatggtgatggcgccgctggccggctatttgatcgagaaatgtcatgccgggctgctgggggctatcggtttgctgattatggcctgcggcctgttcggcctggcgctgctgccctcgtcgccctccgatctggatatcatctggcgcatggcgctgtgcggcgccggcttcgggctgtttcagtcgccgaacaaccataccatcgtcgcctcggctccgagccatcgtagcggcggcgccagcggcatgctgggcaccgctcgcctgctcggacagagcaccggcgcggcgctggtggcgctgctattcaatttgctcggtaacaacggcacccacaccgccctgctgctggccggcaccctggctatcgtcgccgcgctaattagcggtctgcgggtcactcagccgcgcgcagcctgacggacggtaaaaaaaatccgcagcttgcgggctgcggattgtcgttttcagcgtcagaagatggattatttcagatattcaccgctacgcagggcttcaatacgcttatccagcggcgggtgagtcataaacagttcgctcatggatttcgctttaccgttaatgcagaacgccatcatgctgctggcttcctgcggctcatagctggttttcagacgctgcagggctgcaatcatcttctcgcggcctaccagacgcgccgagccggcgtcagcatggaactcacggtaacgcgagaaccacatggtgattatgctggccagaataccgaacaccagctcaagcaccgtggcgaccgcgaagtagatcagcgggttgccattgctgctctccccttcatcttcccggttgccgccgaggaaaccggccgcaatctgcgcgataacgcgggagataaagataacgaaggtgttcaccaccccctggatcagggtcatggtaaccatatcgccattggcgatgtggctgatttcatgggcaatgaccgcttccgcttcatcacggctcatgttttgcaacagcccggtgctgacggcgaccagcgaggcgtcacgacgcgcgccggtggcgaaggcgttaatgtcaggcgcgtgatagatagctacctgcggcatggcaatacctacctgctgcgcctgctgcgcaacggtattcatcagccagcgttccgtttcgttgcgcggctgctcgatcacttccccacccactgacttcagcgccatccacttcgacatcatcagcgaaacgatagaaccaccgaagccgaacagcagggccataatcagaagaccggtcatgctgctggattggatccccgtgaggcttaacaccagcccgaacacgaccatcactgccaggttcgtcagcaggaaaagcgcgattcgcatcataattttctttttacctcaatttaacaaaacgcactatgcgattacccacatcgtatgggtcaggctgcaattttcaaccatcagcccccgctaagtcacgataaaaacacaactttacattttgtagcatcttgctgacagcggcagcacaggttgacattttgttagatgagctgaatggcgatgacaacgcgcacaaaaaaaacgggcacctctcagggtgcccgttagcaacttatttgctggccggcggttccaccgccgggcgcgctttttccagatgcgccaggtctaccgcgatatggaccgtttcatcaagatacggatccggctcctggtaatccttcggcagatcgtccagttttttcagcggcggcttgccttcgcgtttcaggcgatcgttaatccgcgccagacgaatcgcatcatcttcttcgttctctttctcacgctgggcgtagttcagagagacgatgttacgtttgtccttcatcgcgttataacgggcaatatccttcatgatgtactggaattcaggatcctgcgcaatacgctcgtcgtggcgcttgagcagctccggtccaaacggggtcagatccccggacttcacataggtggccgcgttgatgctatcccacggcagcgcgttgtcttcatactgctcgccggtttcgcgatcttcattgccggttggcatcatgatatccggcgtcacgcctttgcgctgcgtactgccgccgttaatacgatagaacttctggatggtgtactggacggaacccaacgccggccactccggacgcagcatttgatcgtaaatacgattcaacgagcgatactgctgtaccgtccctttaccgaaggtcggttcgccaacgatcagcgcgcggccatagtcctgcatcgctgcggcgaagatctcagacgccgaggcgctaaagcggtcaaccagcaccaccagcggccctttgtaataaaccacgccatcgttgtcgctgtcttcgcgcactttgccattattatcccgcacctgcaccaccggaccggacggaataaacagacccgagagcgataccgcctctgtcagcgctccgccgccgttgctgcgcaggtcaatgatgatgctgctgacgttctgtttttccagcttctgcagctgcactttcacgtcatcggtcaggccaacgtaaaagcctgggatatccagcacgccgactttttctttcccgacggttttcaccgacatcttaaccgcacggtcttccagacgaatgcgctcgcgggtcagcgttacaatacgcgtcttggctcctttaccggccggcaggatttcaagacgaaccttgctgcccttcggccctttaatcagcgccacgacgtcatccagacgccagccgatgacatcaaccatcgacttcccggtctggccaacgccaacgatgcgatcgccgacgctgatcgctttgcttttcgcggctggaccgcccgccaccagcgaattaatgacggtatagtcatcatccatctgcagcacggcgccgatcccctcgagcgagaggctcatttcggtattgaactgctcggtattacgcggcgacagataatttgtgtgcggatcgatttcgcgagcgaaggcggtcatcgccagcgagaagacatcttcgctgttggtttgcgccaggcgacgtatagcaaacttatagcgacgggttaaggtgtcgcggatctctttatcgtctttacccgccagcttcaggcttaactggtcaaacttaaccttagcgtcccacagcttgttcagctcggcctcgtcttttggccacggcgctttggagcggtcaaggttgaaattatcattgccggtaaagtccatcggacgttcaagcaccttcagcgcatactgatagcgctcgaagcggcgctgttgccccaggttgtagaggtcgtaaaagacgtccagtttcccgctgcgcagctcatcgccaatttggtcttttttagccgcaaacttcgccacatcgctggccagcagcacattgtggctgtagtccagcaggttcaggtaacggtcaaaaatctttgccgagaaggcgttgtcgagatcaaactgacggtaatgagagcgggtaaagcgcgacgtcacgcgctcgcttaccgtcgcgtgctgcggctcttctttcagcacggggatttgatctgcgcgggttatgtcatcaacagcgaatgcatggcctgctattgccagcaggcccgcaagcgcggtgattttaaaaaatgtgttcatgcctggcccggcctccgtttcagaacaccaggtgttctgcgcgtacaatcattgacataccagaagtcagctgtacacgaacgccatctttggtgatttccagaacggtggcgtccatggcgttattgcctgcttttaccttcagcgcctggccgacggtcagaacggaaacatccgataccggagtaagacgctcttcacgcggggctttggccgcaacaggacgcggtttacgctgttcagcgccttctttacgacgcggctgctgaggacgcggtttacgctcgcggcgaacgccttcatcctgctggcctgcggccgcagcggcttcgcgttttttcgcctgctgggctgcgcgctgcgcctgaacgcgagctttcgcttcttccagctgctgacgcgcatgggcaatgtgctgctcttccagttcgccgcacggattgccatccaggtcaacgcgaatagcgccggcttttacgccgtacagataacgccagctggacgtgtagagacgtaatgcagcgcgaagctgggtcttgctgagattcatctcaccacccactcgctcaacgagatcctgaaaaattccgattttcagggggcgcgcttcaccttcagcgctaaagcactgcgggaaacgttcggccagaaaggcgataacttctttactgctattcaacttaggttgattttccatgaaatttcctgattacaacggacgtagccaacaagccgcaggcatgaacaggcgacattataatgacgtcctcgctaaatgctacgttatccgttgattatcccacgacacgggtaaagattttttgataatccgtggccgcaatgagtttttccagatgctcgaccagcgtgcgcaacccctgctcatcttcagcggtgaagcgcccgtaagccggactatcgatatccagcacgccgataatctggccattcacgcgcagagggaagacaatttccgaattactggcggcatcgcaggcaatgtggccgtcaaaggcgtggacgtcctcgacgcgctggacctgagcctgcgccaccgccgcgccgcatacgcctcgcccgaccgggatccgcacgcaggccagtttgccctggaacggtcccaacactagggtatcgccttccagaaggtagaaaccggcccagttgacctcgctcagccgctcgaacagcagcgcgctggtattggcgatcatcgccagaaaactggtttcacctgccattaatgcctggaaatcgcggttcagatccgcgtaaaattctgttttgctcattatatcttcactttgttgtcttactgcctgatacgtacagcctactaaaataagcattaaatgcgcttgggctcaagatgaattcattcataggttaagatagtgagatacattcattcctgtacgtaataaatgccgataaaaacacccaccctcaaacctgcgaaaaagatggtcgtgcatactgtcagcacgccgcttccctatgcgcattatcagcgctgtacgcagtgtgacatgctcttccgcttaccggtgctcaaacgcaaccaaagcgcctggtgtccgcgctgtaacgcgaaggtgcgcgatggccgcgactggtcgctgacccgcctgggcagcatggccctcgcgatgctgttgctcatgcctttcgcctggtcggagcctctgctgcgcctgcatctgttgggcgtacgcatcgacgccaacgtcctgcaggggatctggcagatgaccgcgcagggcgatccgattaccgccgccatggtgctgttttgcgcggtggtcgccccggtgctgctggtggtctccatcagctatctctggctgggcaatgtgctggggatgaacctgcggccggtgctgctgatgctcggcaagcttaaagagtgggtgatgctggatatctatctggtgggcatcggcgtcgcctccatcaaggtgcaggattacgccttcctgcagccgggcatcggtctggtggcgtttatctccctgacgttgttgagcatcctgacgcttattcatatgaacgtcgaagagctatgggagcgtttctatcccgagcgtccggcgacccgcgccgataataatctgcaggtgtgcaccggctgccattacaccggctatcgcgacgcgcgcggccgctgccgacgctgccacacgccgctgcatcatcgccgaccgcagagcctgcagcgcagctgggcggcgctgattgcctcgctggttttcctctttccggccaacctgttgccaatctccatcatctacgtcaacggcgcgcgccaggacgacacgatcctctcggggatcatctccctggccagcagcaatatcgccattgccggggtcgtgtttatcgccagtattttggtgccattcaccaaagttatagtgttatttaccctgctgctcagcatacaattcaagtgcgagcagggattgcgcacccgcatcctgctgctgcggctaatcacctggattggccgttggtcgatgctggatctgtttgttatctcactcaccatgtcgctaataaatcgcgatcagctcctcgccttcaccatggggccggctgcggtttactttggcggcgcggtaattttaactattcttgcagttgaatggctggacagccgcttactttgggacgcacatgagtcaggaaacgcccgcttcgcagactgaagccagaataaaaaccaaacgccgtatttcgccattctggctgctgccggtcatcgcgttgctgattgccgcctggctaatctggaccagctttgacgatcgcggatcgacgattacgattgatttccagtccgcgaacggcatcgtgccgggacggacgccgatccgctatcagggggttgaagtcggcaccgtccaggatattagcctcagtaaagatctgagtaagattgaggtttcggccagcatcaaacgcgatatgaaagatgcgctgcgcaaagagacccagttctggctggtcacgccgaaagcctctctggccggcgtatcgggcctcgatgcgctggtgggcgggaactacatcggcatgatgccgggcaagggtgaacccgaagatcactttgtcgccctcgacacccaacctaaataccgcatcaacaacggcgagctaatgatccacctgcaggcgccggatcttggctctctgaacagcggctcgctggtctacttccgaaaaatcccggtcgggcgggtgtatgactattccctgaatgccaataatcagggggtgaccatcgatgtgctaatcgagcgccggtttaccaatctggtgaaaaaaggcagccgcttctggaacgtctcaggcgtcaaggccgacgtcggcctgagcggggccaaagtgcaactggagaacctgtccgcgctggtgaacggcgccatcgcctttgactcccccgccgattcgcatgtcgcctcgcaaaacgatgaatatcacctgtatgaagatctggcgcatagccagcgcggcgtggtggtgaccctcgatctgcctgatggcgatggactgaaagcgggctcgacgccgctcatgtatcaggggctggaggtgggccagttaagcaaactgaatctaaaccccggcggcaaagttactggcgagatgaccgtcgacccgagcgtggtgacgctgctgcgggagaaaacgctgattcagatgaagaagccgaagctctccctcgataaccccagcattagcaccctgctcaccggcaatacctttgagctggtgcccggcgaaggcgagccacgcaatcacttctcggtaatgccggcggataaagcgctgctggatgagcccaacgtcgccaccgttaccctctcggcgccggagagctacggcatcgacggcggtcagccgctggtgctgcacggagtaaaagtcggccaggtgctggagcgtaaactgacggccaaaggggtaacctttcaggttgccattgatcctgaataccgcgatctaattcacggcgacagcaaatttgtggttaacagtcgtctggacgtcaaagtggggctcgacggcgtgcaggtgctgggcgccagcgccagcgaatgggtgaacggcgggatcagggtgatcccgggcgaaaaaggcaaaatgcaaagcagctatccgctgtacgctaaccttgaaaaggcgcaggaaaatagcctgagcgaagtgccgaccactaccctgagcctgtctgctgagacgctgcctgacgttcaggccggctcggtggtgctgtatcgtaaattcgccgtcggcgagatcatcgccgtcaaaccgcgcaaggatgcattcgatatcgatctgcatatcaagccggaataccgctacctgctgaccaacaacagcgtcttctgggcggaaggcggtgcgaaggtcaagcttgacggtaacggactcaccgtgcaggcctcgccgctggcgcgcgcgatcaaaggggcgatcagtttcgataacctcaatggcagcagcgccggagcacggctgaataacaaacgtatcctttatgcatctgaaacggcggcgcgcgccgtgggcggccaaatcaccctgcacgcgtacgacgccgggaagatggcggccgggatgccgattcgttatctcggcatcgacatcggtcaaatccagtcgctggagctaatcaccgccaaaaacgaagtgcaggcgaaagcggtgctctatccggaatacgtcggcaccttcgcccgcgccgggacccgcttctcggtgatcactccgcaaatctccgccgcgggcgtggaacatctcgacaccctgttccaggcctacatcaacgttgagcccggccgcggcccggcacgacgcgattttgagatccaggatacgacgatcagcgattcgcgttatatcgacggcctgaacatcgtggtggaagcgccggaggcgggatcgcttggcatcggtacgccggtcctgttccgcggactggaagtcgggacggttaccggactgtcgctggggtcgatgtctgaccgggtgatggttaagctgcgcatcagtaagcgctaccagtacctggtacgtaataactcggtgttctggctggcctcgggttacagcctcgacttcggcctgattggcggggtggtgaaaaccggtaccttcaatcagtttatccgcggcgggatcgcctttgccacgccgccgggcacgccgctggcgccgaaggcccaggatggcaagcacttcctgctgcaggagagcgagccgaaagagtggcgggagtggggcaccgctctgccgcagtaatgcccccttctcccgccccgggcaacgccgggcgcggggagagggtaaaccgcacgccccggtgtcacgcgccggggcgtttgtgctaaactgcgcaccctttttttctgtggtgcgctgcccgtggctgaaaatactgtctatttccctgaagcgtttctcgctcaaatgcgcgcggcgatgccagcgcatctctctttcgacgactttatcgccgcctgtcagcgcccgctacgccgcagtattcgcgtcaatacgctgaagattagcgtcgatgatttcctctctctggttgccccctacggctggcagctcgcgccggtgccctggtgcgcagagggattctggatcgagcgagaggatgacgacgcgctgccgctgggcagtaccgccgaacatctcagcgggctgttctatattcaggaagccagttcgatgctgccggtcgccgccctgttcgccgataaccggcagcccgaacgggtgatggacgttgccgccgccccgggatcgaaaaccacccaaattgcagcccgaatgggcaacgcgggcggcattctcgccaatgaattctccgccagccgggtgaaggtgctgcatgccaacatcagccgctgcggcatcagcaacgtcgctctgacccacttcgacggccgggtttttggcgcggccttgcccgaaaccttcgatgccatcctgcttgacgccccctgctccggcgaaggggttgtacgtaaagacgccgacgcgctgaaaaactggtcgccggagagcaacctcgacatcgccgccactcagcgcgagcttatcgacagcgccttccatgctctgcgccctggcgggacgctggtgtattccacctgcaccctgaatcgtgaagaaaatcaatcggtcattgagtggctgctgtcccgctatccgcaagcggtggagatcctgccgctgggagagttgtttcccggcgcagccgacgccctaaccgcggaaggttttctgcacgtttttccgcaaatttacgattgcgaaggcttctttgtcgcgaggttgcgcaaaactgcggcgatcgatccgctcccggcgccaggctataaggtcggtaaattcccgtttacgccgctgaaggaccgggaggccgccgcggtaactgccgccgccagggctgttggcctggagtgggacgcaggccatacgctgtggcagcgggataaagagctgtggctgtttccgctggctttggagcccctgttcggcaaggtgcgcttttctcgcatcggcgtgcgcctggcggaactgcacaataaggggtaccgctggcagcatgaggcggttatcgcctttgccgcgccgcagcgcgccttcgagctgtcgcaggaggaagcggaggaatggtatcgcgggcgcgacgtctatccgcaaaccgcgcctgggcaggatgaaaccattgtgaccttccagggcgttccgctgggcctggcgaagcgcgtcggctcccgactgaagaacagctatccgcgcgaactggtgcgcgatggaaaactttttgccggcaaggtgtgaggccgagcaaaaaatgcgcactttttgactggcgcttttcgccccattgactacgctgaaaaataacggccataactggtcgtaccacaactcagctgaaaaatggggtgaagcgatgagtaaaaccaatgtccgcatcggcgcgttcgaaatagacgatgccgaactgcacggtgagcatcagggtgagcgaacgttaagcataccctgcaaatccgatccagacttatgtatgcagcttgatgcctgggatgccgacaccagcgtgcccgcgattctcaatggcgaacattccgttctctaccgtaaacattacgaccgccagtccgatgcctgggtcatgcgccttgcctgacaccaatgaacccgtcgcctgagacgggttatttatttccccgtcccgccgtcatcccctacactaaatagtatgtgaacccgagcatgaggccaggatgtttgccttagtgttgtttatttgctatctggatggcggctgcgaggacattgtggttgacgtctaccgcgaggaaacgcagtgcttagtggcgatggaggatcagcggatccgccacggtggctgctacccgatagaagattttattgatggcttctggcaacccgccagcgaatacagcgacttttagcctgccgactgcagcgccaccagcgtcagcgtcccaccaaacacagcgcccgtatcaatatagtgttgattatcgtggtcataacgcgcctgaagcggcgtatggccaaaccagaaatggtccgcgccggcaatagcgccatggcgccccgccaggtgttcactcagacgatggcggctccatagtacccgttggggatccaccggctgctgccagcgatagaccggcgccgggtaatcggcgtgggcgatcacatgccgcgctttcccgcattccacttcaataatcaacggtagccgccgacagtgcgccagcagccgatcgacgtcggcccgctgccgcgcatcacccttgacgtaccagtcgccaccgttcatctgccagagccgcatatctccgctctccagcgcctccagcgccatctgctcatgattcccccgaacggccctgaaccagcgacagcgcaacaggccaagacaatcggcgctctgcggcccgcgatcgatcagatcgcccaccgagatcagcagatcggcccagggatcaaaacgcaactgacgcaggcgattcatcagcagcgcaaagcagccatgcagatcgcccatcagccagatattacgccagtcgctgccgttaatacgttgatacatataattacctctcagcggtaattataggtaattccagcaaaggtccacggaatttaatttacacctcaatcaattttaaacagacggcaaatatagtccgccagaggattaagcttgtcagtggctcgctttaaaatagggggaaatcacaacgaggtgtttatcgtgacagacaatagcctgcattcatccggcgtgctagcgccgcgctcgcatcttattgccgatctggtgatgggcagattgacacctgcccctatctggcggcaaaaaaattaccgctttaagtttttgctgcgcacggccttattttataacgccaccagagcgatgctggaagcgctcagcgctcgggatgattttaatcagctgctggccgcgcaggctacgctgccgggcaaagtacaccgtcaatatctgacccgcgatctcaacgcctggcagcgggcggtggcggtaatcaaccattatcgttatatcgacaccctacgcggatcgcggctggcgcacgctatgaccgcggtgtctgaggtcccgctgctgacgttaaacggaaaagaggaccgccggtttactctttatgcctcctcggcaggcaaagccgaacgtgagggtgaaaccactctgtggctgcgcgacagcgaccacaccctgctggccagcgccaccttcagcgtaacccgtgatcacgatgcctggcagctggttatcggcggtctgcaggggccgcgacgtcacgtttctcatgaggtgattaagcaggcgactcgcgcctgctacggcctgtttccgaagcgcctgctgctggagtttatctggcagctggccgcgcgcagccaaatcgcggctatttacggcgtcagcgataatggtcacgtgttccgcgccctgcgctatcgcctgagcaaaggccgccatttccacgccagctacgacgagttctggcagtctatcgacggccagccggaaagcccctggcgctggcggctaccgctatgtctggaaagaaaatcgctggagagtatcgccagtaaaaaacgggctgaatatcggcggcgattccagctgctggatcagctgacggagcaggtggcaatattgacgcagcggcatgccggtgactaaattgcgctgtaggtgaagccgaattacaacatggcgtttgcttattatgccaatatttcgctactatcagggtccccgaaggccaccggatagtcgcttgcataatgagtaaaaccgaaatttttctgctgattattctggcggtcattctgctcgggagcatatggtttattttcagcgatgaaatttggctattgctctgctatctggaaagtcagatataccctacattcagcgttccgcaataatattttccgcccgcaaaagtgctcgtgcttattatttatgccacctcgtcagccggcgaggtgtaatcgcatgaattgccaaatcgtttagattttgcttattttatttatcatacaaatatgtatactagcaggcttccgatgttggcccgccagttaacctgcacgccgggcctgtttaggtgcaggttttttcttttctccgccctcgtttacggttccaccgttgccacctccccttccacaggatgcgatttatgtgtaaatgaattgtgtatgctaaaaacggtgtgctataacgggacatccagaggccagcgggtgtttgactgacaggatgtcgctggctcttgagaaagaagacagataaagataaaaagagaccgaatacgattcctgtattcggtccagggaaatggctcttgggagagagccgtgcgctaaaagttggcattaatgcaggctaagtcgccttgcactataagaatagtttaacgcgtcagcttttccagtccgcggccaaagtggctgcataattcctggaaagggggcccctgccagcgaaaaaaccgccactgccgttgtccggcaagggcggtttttttaatgttattacagcaggatagcgagaaagtttagcagagcttctgcgctcgctcgataaagggcgcgaggctcattttttgtcccggatgctgcggatcgtcgatctggatcactgagatcggctgcgcggtggttttgccggctttgacctgctgctcagccacctcattgagcggatactgaaccagcgtgctcgggttgatggcgtaaagcgcgttacccggtcgacaggtcaacataacctcttcccggttgaacgcccagctctccttccccacctcaaaacggctcacggtgataatttgtggcgctgccagagcagccccggagcttgccagtaacaacatggtcagaacaatttttttcatgattttgccagttaattcaataaggttcccaggtggcaaacagactgacggccagcagcgccagcgcgcccagccctatttcagcctgcgtggttcgcaggatcaggctttccgcctgcgaaccgcttgccgacatgcgcggtaccagaacatacctgttcactaacgcaattaccaccatcccggcgaccagcgcacatttgatcaacaacatgcgtccccacggcgatgcgccaatcaatcctccctggatcaacagcgcattgagcgctccgctggcaatcgtgccggtgacggccagatgcccgtaacgtgaaaagcgcgccatggtatagaccgcggccggccgccagcgcccctgcgccaggcgcaggcaatagataaagggcaacagaccgccgaaccagctggcgacgcagaagagatgcacagcgtggtttgtccgctgcagcacgccggtgagaccatcgtgcatagcggcgtgccctaccccggcggaaagcagcagctgtgccgccagcagggccaccagctggcgggcgccgtgacggggacggatccacactaccgcaagtgcgatccacgccagtaggatctgccagatccacactccaccaaagcgggtcccggccaccgcctgccagacggcgggtcgccagacatccgtccagccttcgcccatcattcctccctgcaggagatacagcgccagcgtagagatcgcgccgatcagcagcagcgggcgcagtagtggataaaagcgcagcatcagcacgcgtctcagcggtaccggcgcccaccaggcgccatacagcacgcagccaaaagccagcatcagggagataaagtgcccaaagcgcagggtaatatagagcccggtcagcatcgcttacttcacgctaaaggtatattgccctttggttttatgaccatccaccgagaccacatgccatgccacggtgtactctcccggcggcaaggcttccgccaaaggtaacgtgacctcggccggattatcggcgctgcgggtcagttttccggtagccaccgcatgctgctgcggaccggtgacggtcacgccgctgaatgcgggttcaataccttcggaaaaactgagcgtcagcgtctgtggggaagctgaaagctgcgccccggcggtcgggatctgctgctgcaggtgagcgtgggcgaaggcgcccgccgcggttaacatcccggcaagcgcaacggagaggcgcaacgcgcgtccagcaagaagtcgcatattcgtcattcccttttgttatgtctgtagcacagagaataaccctgtataatgccagagtcgagccaggcatctggccctgaccggatttataagcagagtggagtggatgatggaaagaaatctggccaaaatttcgcaagatgagatggataaagtcaatgtcgatctcgccgccgccggcgttgcttttaaggaacggtacaatatgccggtggtcgctgatttagtcgagcgtgaacagcctgcacatctgcgcgactggttccgtgaacgactgatcgcccatcggctggcctccgtctccctttcgcgactaccgtgggagccgaaacagaaataatgcgcgctcgcctcctccccgtcggttggcaagcccgaccaattccattacgctatttgttttgctctggagcgagccatgctgcgcgtcattgataccgaaacctgcggcctgcaggggggcatcgttgaaatcgcctcggtcgatatagtcgacgggcaaattaccaatcccatgagccatctggtgcgtcccgatcggcccatcagcccgcaggcgatggctatccaccggatcacggaagagatggtcgctgataagccgtggattgaggagattattccgcactatcatggcagcccgtggtacgtcgcgcataacgccagcttcgatcgccgggtgttgccggagatgcacggcgagtggatctgtacgatgaagctggcccgacgcctgtggccgggaatcaaatacagcaatatggggttatataaatcacgtaagctgaacgtgactacgccgccgggactgcatcaccaccgggcgctgtatgactgctatatcaccgccgcgctgctgctggatatcatcaatgtttccggctggacccctgacgaaatggccgatatcaccggtcggccggcgctgctgactacttttaccttcggcaaataccggggtaaggccgtcgccgagattgctgaaaacgatccaggctatctgcgctggttattcaacaatctcgaccgcatgagccccgaactgcgcctgacgctcatgcattacctcggggaatagcacctacactgccgcttttcccggcagtgtcccctgcgccagggcgatgaaaaaggcgtactccagcgccaccccttcatagcttttaaagcgcccggattttccgccatgtccggaatccatatcggtgcagagcagcagcaggttatcgtcggttttcagttcccgcagtttcgccacccatttagccggctcccagtattgcacctgggaatcatgcagaccggtagtcaccagcatgtggggataggcctgcgccctcacgccgtcatagggactgtagcttttcatatagtgataataggtttcatcctgcggatttccccactcttcaaattcaccggtggtcagcggaatagtttcatcaagcatggtggtcaccacatcgacgaacggcacctgggctatcacgccatggaacagctctggccgttcattcacggccacgcccatcagcattccgccggcgctgccccccatgccgtagcaaagccgcggatcgccgtacccctgggcaagcagcgcgtcacagacgtccagatagtcgttgaaggtatttttcttacacaggaatttaccgtcttcataccattgctgacccagctcgccgccgccgcggacgtgggcgatggcgtagacaaagccgcggttgagcaggctcagccggctggcgctgaaatcggcatcgatactctcgccatatgagccatagccatagaccagcagcgggttgctccctttgcgaaaatgttcgcgatggtagaccagagagaccgggacttcgacgccatcgcgggcggtcacccacaggtgttcgctctggtagcagctcgtatccagcccctttacctcctgctgtttgatcactcttcgttcgccggtatccatatccagttcaaacagcgtatccggcgtagtcatggaggaatagccgtagcgcagtcgcgacgtttcgggctccggattataggcaagccaggtgacataggccggatcgtcaaaagcgatccccaccacctcccgggtcttgcggttaatttgccgcagactggtcaggccacgctgacgctcttccacaaccagccagtcggtaaacagggtaaatccttcgagcatcacgtcgtgacgcggggggatcagcgtggtccactgttcttcatcacgcagcacggtacggtagaggccgaaattcttcccctcccggttggaacgaagatagaaagcgtgctgatagtgatcaagactgtattcatgatctttacgccgtggcagaaagcagaccggctcggcgtctggcagttcggcgttgagcagcagcacttcgctggtggtggcgctggagagataaattaccacgaactgctgggaggtggttttatgcacgctgacgtagaaggtctcatctttttcctcgtagaccagcgcgtcgctctgcgccggtgtcccgacggtgtggcgccagacctgataagggagcagcgtggtgggatgtttacgcacataccaaacaaagcgtgaatcgttgctccaggcaaagccggaggtgacattttcgaggatttccgggtaccactcgccgttgctgaggtcgcaaaagcgcaggccgtactggcggcgggaaaggtaatcttccgccaccgccattagctggttgttgggcgcaatgcccagtccgcccagggtgtagaactcgctcttcgccgcccgctggttggcatcgagcaggatctcccactcatcccactcttctttcagcaccgactgccgctggtagatagcgtattcgcagcccggctcatacacctgacggtagcgaaagccgtttttactgtagggggcagagacttcccgctgcggaatgcggtcgataatctccttcagcagacgctcctgcaggctgagctgcgaatccatcacttgcttgccgtaagcgttctccgcgtgcagatactccagcacgtcaggtcgcgcgcgctcatcgtcgcgcagccagtaataattatcgatgcgtgtatcgccatgcaaggtcatggcgtgagggatccgtttagctttaggtggcatgttattcttctgctgctttatcgtgacacaagagcattcaggccgcagggtggcgcctgaatgatgacgtgtctataagggtggcaaaagacgcgagcgatgcaagcgaaacgtgatgatttagacgcttagcgcttgtttttgtgactggatatcctgttctatatcggcccggacatctttcggcagcgccagggcgtctcccagcgcattaaggtagctacgctccataaaatggtcgatatcaatcaccgcgcagctgacgtagtagatctccagcgcctcctgcgggtcgatgatgccctcggagagacgctgcggatccagcggctgggccagcgcctggtcaattagcacccgggcctgaacgtcaatattggccgcccgcagctgagtttcaatattcgcccgctcgtggtcatcaatatgaccgtcgcttttcgcggcaaataccagggccgtgatcagccgcacgctgcgcggatcgacatccgtcggcgccgctgccgtctcaggcgcctgggcggacgtattctgcgcgcgcattttctgctgatacttgttccataacaccgtgcccgccaccgccccgccgcctgccagcagcgcgctagtgccatatttcgccaacaatttgcgtgacgatttgctggccaccagcaatccggccagcccaccgatggcgccgggcagcaggccgctcccttttgacgactcgccggacggtgacgcaccctgctgcccgagcagcgactgcagttgatgtagccagttagccatggttttcctctcaggtgacaaacactgttatcagcctaaacgacgcgatgtcaggaaatgttagatatggctaaagatgcgcaaaggtacgtgcgacggcagcatcggagccgaccgaccagtgactgaccgccagcgttcaggctgccctggctttgcgcgctttggccgccggcacggcgtcatcacccgccggagaagtctcggcggtagccgacggcgcggaggcgtcctgtgcgggcgtctcttgctccggcagtcggccaactcgcaggatatgctgcagcgcttctttacgctccgccagccacatcgccatggtatcgcactggacgtcatccatctccagcggcgatgccaccagccagtcattcagcacctctgccagatcgagcattttgtcgtaagcgtcggcctcttttttgctggcaaaagacattttttcctcaccttcgcggatcaccacatatttaatttcaaccgccatactgcagcctctcaatactgtatttttatacagtatagcaaatttccctcccggactcaactcacgcgcgttacgcgcgtaaagacatacgcaaacgttttcgtttataatcgctgccatctttttttactgcggatgagagttatgactgtattaggcaccgcgctgcgcccggcagccaccaaagttatgctgttaggttccggcgagttgggtaaagaagtcgctattgaatgtcagcgtctgggcattgaaaccatcgccgtagaccgctaccccgatgccccggcgatgcaggtcgcccaccgcgcccacgtcatcaatatgctgcacggcgagagcctgcgcgccctgattgaacaggaaaaacctgattatatcgtgccggagatcgaagctatcgctaccgacaccctggtcgaactggaacaggccgggcagaaagtggtccccacggcgcgggcggcaaagctcaccatgaaccgcgaaggcattcgccgtctggcggcggaagagctgcagcttcccacctcccgctatcgttttgccgacagcgaagaaggcttccgcgcggcggttaccgagatcggtttgccatgcatcgttaaaccggtgatgagctcctccggcaaaggccagagctttatccgctcggctgaccagctcagcgaagcctggcgctatgcgcagcagggcggccgcgctggcgccggacggttgatcgtcgagggggtggtgaacttcgatttcgaaatcaccctgctcaccgtcagcgctgtcgatggcgtgcatttctgcgctccggttggccatcgtcaggaagacggcgattaccgcgagtcctggcagccgcagcagatgagcgacctggccctcgagcgtgcccaggccatcgcccgcgaggtggtgctggcgctgggaggttatggtctgtttggcgtggagctgttcgtatgcggcgacgaggtgatcttcagcgaagtctccccgcgaccacacgacaccgggatggtgacgcttatctcccaggatctctcggaattcgccctgcacgttcgcgccttcctcgggctacccgtcggcgctatccgccagtatggtccggccgcctccgcggtgatccttccgcagttgtccagccagaacgtcagctttggccagctgcagtcggccgtcggggctggcctgcagctgcgtctgttcggcaagccggagattgacggtacccgccgcctgggggtaaccctcgccgtcgccgattcggttgaggaggccgtggcgcgggctaaagccgccgccgcggcggtcatcgtcgaagggtaaagacaaaaaaacccggtcgcgttgccgcagaccgggttgttgacctggaggcgtggtttatttcgcgccttccaccgcttctcgcgcgagggtggtgatgcgatcgtagtcgccggcttcgagggcgtcggctggcaccagccaggaaccgccgatgcacagtacgctgttcagcgccaggtagtcacggtagttggccggagagataccgccggtcgggcagaaacgaatgtggccgaacggacccgcaatcgcctgcagggctttcacgccgccgttggcttccgccgggaagaatttaaactctttcaggccatactgcatacccagcatcagctcagataccgtgctgatccccgggatcagcgggatggtgccgtcttcggtcgccgctttcagcagggattcggtaagacccgggctgatagcgaactgcgcgccggcttccgttaccgctttcaactgctcaacgttggtaaccgtgcccgcgccgacaatcgcgtccggaacttctttggcaatcgcgcggatcgcctccagggcgcactcggtgcgcagggtaacttccagcacgcgaacgccgcccgccaccagcgctttcgccatcggtaccgcgtgttccagctttttcactacgataaccgggacaaccggaccggaggtgaggattgcttctgctgttgttttccagtttttcatcaggattttctctcgccagatctagaaattaaatcgtcttaaaaagtgatgcaggttgcgccctgctccgcgccagagagcttctcacgcagcgccccaaacatctcccgaccggttcccacgcgcgacgcgctgaggtcagggatatgcggctgacgcgccgccagttcggcctcatccaccagcagcgtcagttcccccgtctgtccgttcacgcgaataagatcgccatcgcgcactttcgccagcaagccgccatcatacgcttcaggcgtgacgtgaatggctgacggaactttaccggaggcgccagagagtcggccatcggtcaccagcgctattttgaaacggcggtccaataatacaccaagtggcggcataagtttatgtaattctggcatcccgttcgcttttggcccctgatgacggaccaccaccacgcagtctttgtccagcagccccgcgtcaaaggccggcaacacgtcgtgctggctctcaaataccaccgccggcgcttcaatcacctggttctccaccgggaccgccgaagttttcatcaccgcgcgtcccaggttgccgctcagcaccttggtgccgccgtggcgggagaatggtttttcaaaggtcgcgatgacctggtcgtccaatggcgctgtcgccccttcgcgccagtccagctcgccgttattcagccatggctccagggtgtagcgcgacaggccaaagccggccacggtgtgaacatcctcatgcagcaggccgcctttcagcagctcgcgcaccagtaccggaacgccgcctgccgcctggaagtggttgatatccgccgggccgttgggatagaggcgcgccagcagcggcaccacgtctgacaggtcggagaaatcgtcccagttaatgataattcccgccgcgcgggccatcgccaccaggtgcatagtgtggttggtggagccaccggtcgccagcagcgccacgatgccgttgaccaccactttttcgtcaaacattttgcccagcggcatccactcattgccgttgccggtcatgcgggtgacctggcgcgcggcggcggcggtcagtgcttcccgcagcggagcatccggatggacaaaggacgagcccggcagctgcatgcccataaattcgaccaccatctggttggtgttcgccgttccgtagaaagtacaggtccccggcgcgtgataagaggcggcttcggactccaggagcgccatacggtcaactttcccttctgcatacagctggcgaatgcgaaccttctctttattcggcaggccgctggccatcggaccggagggaataaagaccgacggcagatggccaaatgagagcgccgccatggtcagaccgggaacaattttatcgcagaccccgagatacagggccccgtcgaacatgttatgcgacaggccgatggcggcggacatagcgatcacctcgcggctcaggagtgaaagctccatcccgtcctgcccctgcgttacgccgtcgcacatcgccggcacgccgccggcgacctggccgaccgcattggcgctgtgcagctctttgcggatgatctccgggtagtgttcatagggctggtgagcggacaacatgtcgttgtaggaggtgatgatggcaatgttgttgcgcaacatgctcttcagggaggctttgtcgtcagcctggcaggccgcgaatccgtgagccagattgccgcaggccagttgcgcacgatgcacggtgtcggttttggcctggttaatccttgcgaggtaagccgcgcgggtgtcacgcgaccgttcgataatgcgatttgttacccgtaacattgtcgaattcataaaggctcctcaaatttttatctgtccggccgctgcgtgatgacgtgttgacgtggtaaaggccacaaacaccagcgctcaggggcaaaatgtctgcaggcagtgtaataaaaaaagccccgtgggtgaatcctcacggggcttaaaagattaaaaagcgtgcgactttctgcgtcagatcatgttaccggtaaaataaccctgacggattagcctccagccttactcgaactcgttccatgaacgaccgtcgcgagtgatcatggccaccgacgcaaccggtccccaggtcccggcctgatacggtttcggcgcatcgcggtcggctgcccaggcttcggtaatggagtcaacccatttccacgcctcttctacttcgtcgcggcgaacgaacagcgcctggatgccacgcatggtctccagcagcagacgttcataggcatcggccagatgcgtctggttgaaggtttcggagtagctcagatccagtttagtgatctgcaggttatgtttatgatcgaggcccggcactttgttcagtacctggatatctaccccttcgtccggctgcaggcgaatggtcagcttgttctgcggcagctcctgccaggtctctttaaacagattcagttccggggttttgaagtaaaccactacctctgagcatttggtcggcagacgtttgccggtgcgcagatagaacggtacgccagcccagcgccagttatcgatatcgacgcggatcgccacgaaggtttcggtgttgctggtcttgttggccccctcctcttcgagatagccaggcacttttttgccctgggcaaagccggcggtatactggccgcgaacggttttctcgcgcacgttggagcggtcaatacggcgcagggatttcagcaccttgaccttttcatcacggatgctgtcggcgctgagatcggacggcggcgacatggcaatcatgcacaggatctgcagcaggtggttctggatcatgtcgcgcatctgcccggcctggtcgaagtaaccccagcgcccttcaatacccacctcttccgcgacggtgatttcgacgtgatcgatggtgcggcagtcccagttattgacgaacagggagttggcgaagcgcagcgccagcaggttgaggaccgtctctttaccgagatagtggtcgatacggtagacctgacactcttcaaaaaactcgccgacctggtcgttgatttcacgggaggtttccagcgaggtgccgagcggtttttccatgaccacgcgcgcaggcttggcattaagcttcgcttcgcccagccctttacagatcgcgccaaaggtgctcggcggcatagcgaaatagttgatggtgacacggttcttttgatccagcatctcacccaggcgggtgaagccgctggtgtcattgacgtcaagattacagaactccaggcgtccgctcagggtatcccacaaaccttcatcaattttttccttcatgaaggtttccagcgcttcgcgcacgactttggtataagccgctttatcccagtcggcacggccgacgccaatgattctggtgtcagcgtggatctggcccgccttttcaagctgatacagggaaggcaacaatttacgccgcgccaggtcgcccttcgcgccgaaaatgaccaggtcgcatgcctgggccgtttgcgttaccgccatgtcattctcctcagttgatagtctggtgcttttgccaggctatatttgtaattttcttacactgcactgtactgtgtttacgtatttcccgaaagccttccccttcgtttgcggcggtaaaaccgcacagggtgaaaacattcggcgatgatttgggcattcggccgttattgttcgttgtttgtacctggttcaggtcagtaaaatacgaccctgatcatgtaatgaaaaaaaacaacatcatttcacgtcattcctcaccgcttgcgcttgcggaggggtatattcttgctaaaacgcccaatgatttcacccattaatgaaatcgtttccattgatgagcgccctgttactaatgaacatgctggaaaaaatccagtcccgactggaacaccttagcaaatctgaacgcaaagtggcggaagtgatcctcgccacccccgagcaggccattcattcgagcatcgccgccctcgcccttgaggccggcgttagcgaaccgaccgtcaatcgcttctgccgtagtctcgaaacccgcggattccctgacttcaaactgcatctggcccagagcctcgcgcacggcacgctctatgttaaccggaatgtcgatgaagacgacagcgttgagtcatacacgggaaaaatattcgaatcggccatggcgagtttagatcaggtgcaccattctctcgacatgtcggcggtaaatcgcgcggtggatctgctgactcaggccaaaaaaatcgcctttttcggcctcggctcctcagcggcggtcgctcacgacgcgatgaacaaatttttccgctttaacgtgccggtcatctattccgacgacattgtcctgcaacgcatgagctgtatgaattgcgatgacgatgatgtggtggtgattatctcgcataccggaagaaccaagagcctggtggagctggcgcagctggctcgtgaaaacgatgccatggtgatcgcgctcacctccgccggtacgccgctagccagggaagccacgctcgccattacccttgatgtgccggaagataccgacatctatatgccgatggtctcccgcttggcccagttgaccgtcattgacgtgttggcgactggctttaccttgcgtcggggggcaaaattcagagataacttgaagagggtcaaggaagcgctgaaggaatcgcgttttgataaagaaccattcgtacccagtgataatcaataaaagttgataacaagcagtaccccattacaccttcgataacgatccggctgtgcgacgttgcaggctggcgctaccgaatccatgttcacgcaacaccaaagttgtatcagtcaacggagtattacatgtccagaaggcttcgcagaaccaaaatcgttactaccttaggcccggcaactgaccgcgataacaacctggaaaaggttatcgccgcgggcgcaaacgtagtacgtatgaacttctctcacggcaccccggaagatcatcagctccgtgccgacaaagtgcgtgagattgcggcaaaactgggccgtcatgtggccatcctcggcgacctccagggaccaaaaattcgcgtatcgaccttcaaagaaggcaaaattttcctcaacgtcggcgataaattcctgctcgacgcaaaccttggcaaaggcgaaggcgacaaagagaaagtcgggatcgactataaaggcctgccggcggacgtcgtgccgggcgatatcttattgctcgacgatggtcgcgtgcagctgaaagtcctcgaagttcaggggatgaaagtgttcactgaagtgaccgtcggcggcccgttgtccaacaacaaagggatcaacaagctgggcggcggcctgtctgccgaagcgctgaccgacaaagataaagctgatatcgtcaccgccgctaaaatcggcgtcgactacctggccgtctctttcccgcgctgcggcgaagacctgaactacgcccgtcgcctggcgcgcgatgccggctgcgatgcgaaaatcgtcgccaaagttgagcgtgccgaagcggtttgcgatcaggatgcgatggacgacgtgatcctcgcctccgatgtggtaatggttgcccgtggcgacctcggcgtcgagatcggcgatcctgagctggtgggcatccagaaagcgctgatccgtcgtgcccgtcagctgaaccgttccgtcattaccgccacccagatgatggagtcgatgatcaccaacccgatgccgactcgcgcggaagtgatggacgtggccaacgccgtgctggatggtaccgatgcggtgatgctctccgcggagaccgctgccggtcagtatccttcggaaaccgtggccgcgatggcgcgcgtgtgtctgggcgcggaaaaaatccctagcctcaacgtctccaaacaccgtctggacgtccagttcgacaacgtggaagaagcgattgccatgtcggcgatgtatgccgccaaccacctgaaaggcatcaccgccatcatcaccatgaccgaatcgggccgtaccgcgctgatgacttcgcgcattagctccggtctgccgattttcgccctctcccgccacgagcgcaccctgaacctgaccgccctctaccgcggggtgacgccggtgttcttcgacagccagaatgacggggtggccgccgcgcacgacgccgtcaatctgctgcgggacaaaggctatctggtctccggcgacctcgtggtcgtgacccagggtgacgtgatgagcaccatcggcagcaccaacaccacccgtatcctcaccgtcgagtaagcacggtagagataaaaaagcctcctgacggaggctttttttatttctttttcgggaacagctctttgcgtttatagggctcgatttcacccggcttgcgcgttttcagcagcttcaggatccaggtatactgctcggtgtgcggcttaacaaacacttccacttcttcgttcatccgccgggcgatggtcgtatcgtcagcgtccagcagatcgtccatcggcgggcgcaccagcaccgtcaggcggtgcgtcttgccatcgtagaccgggaacagcggtacgacgcgggcgcggcacactttcattaagcggccaatcgccggcagcgaggccttgtaggtagcaaagaaatccacaaactcgctgtgttcggcgccgtgatcctgatcgggcagatagtagccccagtagccctggcgcaccgactgaataaacggtttgatcccatcgttgcgcgcgtgcatacgcccgccaaaacgacgacgcacggtattccacacgtaatcgaacaccgggttaccctggttatggaacatcgccgccatcttctgcccgccggaggccatcagcatcgccgggatatccacaccccatgcatgcggaacgagaaaaatcaccttctcattattgcgctgcatctcgtcgatgatcgctttcccctgccagtcaacgcgggcaaggattttctgcggatcgcgcaggcccagctcggccatcatcaccatcgcctgcggcgccgaggcatacatggcgtcgataatcgcttcccgctcgtactcgcttttttccgggaagcagtacagcaaattaatctgcgcccggcggcgcgagcttttcgccagacgccccaccagacgaccgagtttgccgaggagcggatcgcgaaaggatggcggcgtcagcgcaataccggcgaaggcaaagacccccagccaggcgccccagtagcgcggcagtaaaaaggatttttcaaacttagggataaactcaatattattttttttcgtttccatgcccaatccgcagatcgactgcttaatcaagataatgggatagtgtagcgagacgtcgggtatcctacaaaagaaaaagccggcgccctggggcaccggctttccactgaccggtggttagtcaaaccgcagctgcggaacgacctctttgacctgcgccagatagtcggtccggtcggaaccgctcagcccttcggtacgcggcagcttagccgtcagcgggttgaccgcctgctggttgatccacacttcgtagtgcaggtgtggcccggtagagcgtccggtattccccgacagcgcaatgcgatccccgcgcttcactttctgccccggcttcactaacagcttacgcaggtgcatgtagcgagtggtataggtgcgaccgtggcggatcgcgacgtaatacccggcagcgccgctgcgtttggccacgactacttcaccatcgcccaccgccagcactggcgttccctgcggcatcgcgaaatcgacgccacggtgcggcgcgacgcggccggtgactgggttcagacgacgcggattaaagttagaggagacgcggaactgacgcgccgttgggaagcgcataaagcccttcgccagacccgtcccgttgcggtcgtagaatttgccgtcttcggcgcgaatggcatagtaatccttaccgtcagagcgaagacgcacgccgagtaactggctttgctcacgtttgccgtcgagcatttcgcgcgacatcaataccgagaattcgtcgcctttcttcagcttacggaaatccatctgccactgcatggccttgatcaccgcgttgatttccgtgctggtcagcccggcatcacgcgcgctggagacaaagctggcgccgacggtgcccttcagcacgctgttgacccaatcgcctttctgcagctcgctgctcattttaaaaccgttatccacacgggtataggtgcgggtctcgcggcgggacatctcccaggtcaagctctgcagatcgccgtcggcggtcagggtccaggagagctgctggccaatcttcaggttgcgcagctctttatcggcggaggaaagctgggcgatatcgcccatatcgataccgtactggttcagaatactgctgagcgtatcgccggtcgacaccacgtattcgtgcccgccggcatcgctatcggctttttcgtcgagctcatcctgaggaatgacttcttcttcctgcggggcctggtcgatcggctcggaggcttccggcagcagggagcggatctcgcttttttccagttcaatggttctgacgatgggggcggattccgggtggtaaatgtagggtcgccagacggcgaccgctaaggtaagaacgctaagcgaccccagcataacgcgatgaggtcgtggcagattgttgaatgcctgagtgacagcgcgggctatctgttgcacgtattcacttcctcgttaatctcctttcaggcagctcgaatactgattcgccagttgggtgaggaattgcgggtaactcgttttacccagcgtaattcctgtccccagtggatccagggtccccatgcgcacagacgtgccccgggcaacagcttcgataaccgctggcctgaactgtggctcagcaaaaacgcaagtggctttctgctcaaccagttgtgttctgatttcgtgtaaacgctgcgcaccgggctgtatttcagggttgacggtaaagtgccccagcgaggtcaaaccgtagtgtttttcaaagtaaccgtaggcgtcatgaaaaacgaaatagcccttccctttcagcggtgccagctcattgctcacctgcttgtcggtcgccgccagcgcggtctcgaactgctgcaggttgctgtcgagtttggctcgactctgcggcataagttccaataatttatcgtggattgcaaccgccgaaagccgcgctatctctggggataaccacagatgcatattgtaaataccgtgatggtgatcgccgtcacctttttctgctgcgccatggtcatgaccatggtgatcgtcatcgtcgtccgccccggtgatgagcagcggtttgaccccatccagctcggcaatcgtcacctttttattcgccgcaatgctttgcgtcgacttatccataaaggcttccatttccggaccaatccacaccactaagtctgcgttctgtaagcgttttacatcagaaggacggagggaataatcatgctcggaggcgccatcgggcagcagcacctgggtctcggtcaccccatcggcgatggccgccgcgataaagcccagcggtttcatagaagtcaccacggcggcgctggccagcggtacctgcgcgaacaaaaaaacagcgccaagtccagcgcaaagaagcgtatttttatgtaacataatgcgtctagtcatcgaaataagtgagtgtgatgtgatattataacattcactagcttgtgcaacccctaaattactatgacaaaccttgtaacgctggaaaatgtctcggtggcctttggccaacgccgcgtgttgtctgacatctcgctggctctcacgccaggcaaaatcttaaccctgctgggccccaacggcgccggcaaatcgacccttgtgcgggtggttctcgggctggtagcaccgacagagggtgttatcaagcgtgacgcacgcctgcgcatcggctatgtgccgcagaaactgcatctggacgccacgctgccgctgaccgttagccgcttcctgcgtttgcgcccgggcacccgtaaagacgacatcctgccggcgctgaagcgcgtgcaggcggggcatctgatcgatgcgccgatgcaaaagctctccggcggtgaaacgcagcgcgtactgctggcccgcgccctgctcaaccgtccgcagctgctggtgctggatgaaccgacccagggtgttgacgtcaacggccaggtggcgctctacgatcttatcaaccagctgcgccatgaactggactgcgcggtgctaatggtatcccacgatctgcatctggtgatggccaaaaccgacgaagttttgtgcctgaaccagcatatctgctgctctggcgcaccggaggtggtctccatgcacccggagtttatctccatgttcggcccgcgcggcgcggaacagctggggatataccgccaccaccataatcaccgccacgaccttcaggggcgaattgtactgcgtcggggaaacagccgctaatgattgaacttctgttacctggctggcttgccgggatgatgctggcctgcgccgctggtccgctgggctcctttgtggtctggcgccgcatgtcttatttcggcgacacgctggcgcatgcgtctctgctcggcgtcgctttcggtttattgcttaacgtcaatccgttctatgcggttatcgccgtgaccctgctgctggctggcgggctggtgtggctggaaaaacgaccgcatctggcgatcgataccctgctgggcatcatggcgcacagcgcgctgtccctggggctggtggtggtcagtctgatgtctaacgtccgcgtcgatctgatggcgtacctgttcggcgatctgctggcggttacgccgcaggacctgatcgccattgccattggcgtggtgattgtgattggcattctgctctggcagtggcggaatctgttggcgatgaccatcagtccggacctggcgtttgtcgacggcgtgaagctgcagcgggtcaagctgctgttgatgctggtcaccgccctgactatcggcgtggcgatgaagttcgtcggggcgctgatcattacttccctgctgattatcccggccgccaccgcccgccgttttgcccgtacgccggagcagatggccgccgtggcggtgggcgtgggcatgctggccgttaccggcgggttaaccttctcggctttctatgataccccggccgggccgtcggtggtgctctgcgccgcggtgctgtttattctcagcatgacgaaaaaagccgccagctgaaaatgaaaaagcccggtcacgctgctgaccgggcttcaccatgaactgctcaaccgcaacgcgctacggcatttccggcggcgtaatcccgaaatgattccaggcgcgcaccgtcgccattcttccccgcggcgtacgctgcagaaagccctgctgaattaagtagggctccagtacatcttcaatggtttcccgctcttcgccaatcgcggcggcgaggttatccagccccaccggaccgccaaagaacttatctatcaccgccagcagcagcttacggtccatatagtcgaacccttccgcatcgacgttaagcatatccagcgcctgggcggcaatatcggcggagatggtgccgtcgtggcgcacttcagcaaagtcacgcacccggcgcagcagacggttggcaatgcgcggcgtgccgcgtgaacggcgggctacttccagcgcgccctcgtcgctcatctccagccccatatggcgggcgctgcggctgacaatatgctgcagatcggggatctgatagaactccagacgctgcacgatgccaaagcggtcgcgcagcggcgaggtcaacgaaccggcgcgggtggtggcgccgatcagggtaaacggcggcagatcgatcttgatggaacgcgccgcgggaccttcgccaatcataatatccagctggtagtcttccattgccggatagagcacctcttccaccaccggcgagaggcgatggatctcatcgataaacagaacatcgtgcggttcgaggttggtgagcatcgcggcgagatcgcccgccttctccagcaccgggccggaggtggtacgcagattcacccccatttcattggcgacgatattggccagggtggttttccccaaccctggcgggccaaaaatcagcaggtgatcgagggcgtcgccgcgcagcttcgccgcctggataaagatctccatctgcgaacgcacctgcggctggccgacatactctgccagcaattttgggcggatggcgcggtcagcggcctcttcaaagccgctgctgtctgccgataccagccggtctgcttcaatcatcctttacctcacaacgcagcgcgcagcgcttcgcgaattagcgtttcactgttggcgtccggacgcgcgatcttgctgaccatccggctggcctcctgcggtttatagcccagcgcgaccagcgcggcaaccgcttcctgctcggcatcgtccgccgttgggcctgccggcgaggtcagcaccagatcggccgccggggtgaacaggtcgccgtgcagccctttgaagcgatctttcatctcaacgatcagacgttcagcggtttttttgccaatccccggcagcttcaccagcgaggcgacctcttcccgttcaacggcgttgacgaactgctgcgccgacatgccggagaggatcgccagcgccagcttgggccccacgccgttggttttaatcaactctttaaacagggtacgttcctgtttgttgttaaacccatacagcagctgggcatcttcacgcaccacaaagtgggtgaagacgatcgcctcctgcccggcctccggcagctcatagaagcaggtcattggcatatgcacttcatagccgacgcccgccgtttccagcaacaccagcgggggttgtttttcgagaatgatgcctctgagtctgcctatcacgtggggctcctgcgttatggtctaagtatctggcggtatcataaaaaaaggctggatagatatccagcctgatttgcgattatcgtaagcgcccccgcgccagattgagccgggtctcgctgatctgagcggcattctggctgacatggcaatgggtgatggcaatcgccagcgcatccgccgcatccgcctgcggattggcgggcagcttgagcaaggtgcgcaccatatgctggacctggctcttttcggcgctgccaatcccgaccacggtctgcttgacctgacgggcggcgtattcaaacaccggcagcgcctgattggtcgctgcgacgatcgccaccccgcgcgcctgcccgagctttaacgccgagtcggcattcttggccataaagacctgctcaatggcgaaatagtcgggctggaactgggtgatgatctccgtcaccccggcgtagatcagcttcagccgcgacggcagatcgtccactttggtgcggatgcatccgctgcccaggtagctcagctgccgcccaacctggcggatcacgccataaccggtaacgcgcgaccccgggtcaatgccgagaataatagccatcacgcgcctccggttaaccgtggatgcggctgcatcacagggtggctgcgacctcgtcggagatctcgccgttatggtacacttcctgcacgtcgtcgcagtcttcgagcatatcgatcagacgcagcagcttcggcgccgtctcggcatccatatccgctttggtggacggaatcattgagacttcggcagcgtcggctttcaggccggcggcttccagcgcgtcgcgcacagcgcccatctcttcccaggcggtgtagacgtcgatggcgccgtcgtcataggtcaccacgtcttctgcgcctgcttccagcgccgcttccatgatagtgtcttcatcgcctttctcgaaggagataacgcctttcttgctgaacaggtaggagacggaaccatcggtgccgaggttacccccggttttggtgaaggcgtgacgcacttccgcaacggtacggttacggttgtcggacagacattccaccatcaccgcggtgccgccaggaccgtagccttcataaatgatggtttccatgttcgcgtcttcatcgccgccgacgccgcgcgcgatggcgcggttcagggtgtcgcgagtcatgttgttagacagcgctttatcaacggccgcacgcagacgcgggttggaagccggatcgccgccgcccagacgcgcggcggtgaccagctcgcgaatgattttcgtaaagattttaccgcgtttggcatcctgtgccgctttgcggtgtttggtgttggcccatttactatgacctgccataaaaaactctccaaaaagcgcgccctttcaggcggcgttaattacaaattcttcaatcgcctgccggttgctccacgacttggtcagcgcagcggcttccgtcgcgctgacccagcgataggccagatgttcggtgaaagtaatctcccgctcatgaggcagcgcaagacagaaccagaattccgtattgcgctctacacccggcgcatagcgatgacgcaaatgagaaaatatctcgaactccaccgtgcgctgacagtcgattaaggtcagttgctcgcaggcaacgtcaatggcgacctcttcctttacttcacgcgcggcggcctgcagcgcggtctctccagcttccaggctgccggtgaccgactgccagaacgcgggatcgtcgcgccgctgcaacatcagcacccgtttcgtatcttcggcgtaaatcaccaccagcaccgaaacgggcagcttaaatgacatattacttgttctccagagacgcttttgcctctttctccacaacctgaatacccagttcaccgagcgccgcaggattggcgaagcttggcgcttcggtcatcaggcaggcggccgcggtggttttcgggaaagcgataacgtcgcggatgttatcggtaccggtcagcagcatggtcagacggtcaagaccgaaggccagacctgcatgcggcggcgtaccgtacttcagcgcatccagcaggaagccgaatttctcacgctgttcctgttcgttaatgcccagaataccaaatacggtctgctgcatctcgccgcggtggatacgcaccgaaccgccgccgacttcataaccgttaatgaccatatcgtaggcgttggccacggcctcttccggggcggctttcagctcatccgcggtcatatctttcggcgaggtgaacggatggtgcatcgccgtcaggccgccttcgccgtcgtcttcgaacatcgggaagtcgatcacccacagcggcgcccatttgctctcgtcagtcaggctcaggtctttacccagcttcagacgcagcgcgcccagcgcgtcggccactactttcttgttgtcggcgccgaagaagatcatgtctccatcctgcgcgccggtgcggtcaaggatcgcttccacgatttcagcggtcaggaatttggccaccgggctgttgatcccgtccatgcctttggcacgctcggtcactttaatataggccagccctttcgcgccgtagatcttcacaaagttgccgtattcgtcaatcagcttgcgggtcagagaggccccgcccgggacgcgcagggccgccacgcgccctttcggatcgttggccgggccggcaaagaccgcgaattccacagacttcagcaggtcggcgacgtccaccagctccatcgggttacgcagatccggtttatcggagccatagcgacgttcggcttcggcgaaggtcatgatcgggaactcgcccaggtcgacgcctttcacttccagccacagctgacgcaccatcgcctccatgatctcacgcacctgcggcgcggtcataaaggaggtttccacgtcgatctgggtgaattcaggctgacggtcggcacgcaggtcttcatcgcggaagcatttgacgatctgatagtagcgatcgaagccggacatcatcagcagctgtttgaacagctgcggcgactgcggcaacgcgtagaatttgcctttgtgcacgcgggaaggcacgaggtaatcgcgggcgccttccggggtggctttagtcagcatcggggtttcgatgtcgaggaagccatggtcgtccataaagcggcgcacaaagctggtaattttcgcgcgggttttcaggcgctgcgccatctccggacgacgcaggtcgaggtagcggtatttcagacgcgcttcttcggtgttgacgtgattggagtccagcggcagcgattctgagcggttaatgatcgtcagatcggaagccagcacttcgatagcgccggtggccatgtccgcgttgatgtttttctcttcacgcgcgcgaacggtgccagtgacctgaatgcagaactcattacgcagttcagaggctaacttcaacgcatccgcacgatccggatcgaaaaacacctgaacgatgccttcgcggtcgcgcatatcgataaaaatgaggctaccgagatcgcgacggcggttgacccaaccacacagagtcacctgctgcccaacgtgggactgtcgaagctgtccgcaatattctgtacgcatgagatatcccttaacttagccgtcggcggattgtcgtctgccctgcaggcgacgaggtcgcagctttagctgatgtcacaactgaatgaaaaaaggcggctattatactggaaattctgtcgttcgataagtccgacgcacgatgtacgctgctttgctgcgcgcttaacgtccacactcacataaattaacaaaatttgttactcttttgctgaagccgcaaaggtattgtagccgcctgacaacagatgaagatacggggataccatgttagaactcaatgcaaaaaacacggcgctggtggtaatcgatctgcaggaaggcattctgcctttcgccggcggcccgcatcgggctgacgaggtggtggcgcgcgccgctcgcctggcagacaagtgccggcaacagggttcgccggtcatcatggtccgcgttggctggtcggccgatttcgccgaagcgctgaaacagcctgtcgacgctcaggccggggcgcatacgctgcccgaaaactggtggacctacccggccacgctgggtaagcaggagagcgatatcgaagtgaccaaacgccagtggggcgcgttctatggcaccgaccttgagcttcagctgcgccgccgcgggatcgacaccattattctctgcggcatctccaccaacatcggcgtcgaatccaccgcccgcaatgcctgggagctgggttttaacctggtcatcgccgaagatgcctgcagcgccgcctccgccgagcagcatcagggcagtatgacgcatattttcccgcgcatcggccgggtgcgcagtaccgaggagatcctcacggcgctatgatttatattgggcttccccagtggtcgcacccgaaatgggtgcgccttggcatcaccagccttgaagagtacgcccgccactttaactgtgtggagggcaacaccaccctgtatgcgctaccaaagccggagattgtcgcccgctggtacgaacagactcacgatgacttccgcttctgcttcaaatttccggccaccatctcgcaccaggccgccctgcgccattgcgacgagttaagcagtgaattttttgcccgcctggcgccgctggcctcgcgcatcggccagtactggctgcagctgccggcgacgttcggtcctcgcgatctccccgcgctatggcattttctcgacggactgccgaaggatttcacctacggcgtcgaagttcgtcatcccgagtttttcgccaaaggggaagcggaacagcagctcaaccgcgggctgcacgagcgtaacgtcaaccgcgtgatcctcgacagccgcccggtccatagcgctgcggccaccagtccggcgatgatcgatgcccaacaaaagaaaccgaaggtgccggtacatgcggtgatgaccgcccggcagccaatggtgcgctttatcggcggtgacgatatggcccataaccgggaactgtttcgcgtctggcttcagaccctggcgaagtggcatcagtcggggaccccgtggttgttcctgcataccccggacattgctttcgccccggcgctggtggataccctgtggggtgacctgcgcgctgccctgccggcggcaggaaatgcgccgtcgattccgcagcaatcttctcttttctgatatcctgctatcatatccggagccatctgccagagttaaagggagttttcgtatggtcagcgcgctgtatgccgttttaggtgcgttattgttagtgaagttctcatttgacgtggtgcgtctgcgcacccaataccatgtaggctacggtgacggcggctttagcgagctgcaggttgccatccgcgttcacggcaatgccgtcgaatatgtgccgattggcctcattttgctgttatttatggagatgaacggcgctcagacctggatggtgcacgtttgcgggattttattgattgtcgggcgactgatgcactcctggggctttcatcaccgcgtctactactggcgccgctccggcatgagcgccacctggtgcgcgttgttgctaatggtgctggccaatctttggtatatgccctgggagttggttttctccctccgttagcgcacaatacgccgttttcgttttttcgggtttaacgttatgtctcaccgcgatacgcttttttccgcgccgattgccagcctcggcgactggacctttgatgaacgggttgctgaagtcttccccgatatgatccagcgttctgtgcccggctactccaatatcatctcgatgatcggcatgctggccgagcgcttcgttcagcccaacactcaggtttacgatcttggctgttcgctgggcgccgccaccctctccgtgcgccgcaatattagccatccgggctgtcgcattatcgctatcgataactcgcccgcgatggtggagcgctgccgtcgccatattgacgcttataaagcgccgacgccggtcgaagtgattgaaggggatatccgcgacgtgaccattgaaaacgcctcgctggtgatcctgaactttactattcagttccttgagccgggcgatcgccaggcgatcctcaacaaagtctatcaggggctgaatccgggcggcgcgctggtgctctcggaaaaattcagcttcgaagacgcccacgttggcgaactgttgttcaatatgcatcatgactttaagcgcgccaacggctacagcgaactggagatcagccagaaacgcagcatgctggaaaatgtgatgctgacggactccgtcgaaacccataaagcccgactgcgtcaggctgggtttgaacatgccgaactgtggttccagtgctttaactttggctcgctagtggccgtgaaagccggggagcaggcatgatcgacttcagtaacttctatcagctgatcgccaaaagcccgctgtctcactggctggagacgctgcctgcccaggtagccgcctggcagcgcgatgccctgcacggcaagtttcgtgaatgggagcgcgccgtagaatttctgccggagctaacgccctggcgtctggatcttctgcacagcgtcaccgccgagagcgaaacgccgctcagcgaaggccatcagcggcggatcgaaaatctgcttaaaaacctgatgccgtggcgcaaaggcccttattcgctgtacggcatcaatatcgataccgaatggcgatccgactggaaatgggagcgcgttctgccgcacctgtccgatctcactggccggactatcctcgacgtgggctgcggcagcggctatcacatgtggcggatgatcggcgccggcgcacatctggcggtcggtatcgatcccacccagctgttcctgtgccagtttgaagcggtgcgtaagctgctcggtaacgaccagcgggcgcatttgctgccgctgggcattgagcagctgccggcgctggaggccttcgacaccgtgttctcgatgggcgtgctctaccaccgccgctcgccgctggaccatctgtggcagctgaaagatcagctggcgccagggggcgagctggtgctggagacgctggtggttgaaggagatgaaaatacggtgctggttccgggcgaccgctatgcgcaaatgcgcaacgtctattttatcccctcagcggcggccctgaaaatgtggctggagaagtgcgggtttattgacgtgcgtatcgtcgacgcctgcgtcacctcgacagaggagcagcgacgcaccgaatggatgacgaccgaatcgctggccgatttcctcgacccacaggatcagcgcaaaacggtggaaggctatccggcgccattacgagctgtgatcattgccaccaaaccggaaacccagcagtcgctggcgaaaaaagcgagataaaaaaaggcccctgtttaatgggcaggggcctggtacgggcaatcatcatattgggcgacatgatgtgcagcaaaaaaccgtttaacttctccaggcggagataatccttttcatctccgccaccgctgcgccattcacggcgtagcgtctgtattcatcggcatcgggatcggctgacatcgaaacgcccggatgacgaaagcgcatttccgacggcaaccagtggccagcagagctatggacctctttcacccccgcctgcagaaacagcggcaggttcgcggcgcggactcccgcaccggccataatgattggagtatcccctgcggcaataagttccgtaattaatgaaatacctttctccgccgaggattgctgaccggaagtcaggatacgtttgacccccagctcacccagcgttttccaggcctgacgcgggtcagcgcacagatcgaacgcgcgatgaaaggtcaccgccagcggccccgccgcggccattatttttttcatccgcgggatatcgacctggccatcagcatccagcacgccggtcaccagcccgggaaagcccagatcccgcaccatgcgaatatcgttaagcatcgcggcgaactcttcctcggtgtagcagaaatcgccgccgcgcgggcgaacgatcggatgcaccgggagagtaatcgcctcgcgggccgagaccagcaccccataagagggggttaatcccccttcctgcggcgcggcgcagagctcaatacgatcggcgccgtagcgctcagcctcccgggcgcacgccacgctgtagcaacacacttccagtaccgccattcctctctccctgatccagacaacctttgcagcatgtcacaatttcacgcggcagacgccgcgcggcttcacactgttacgtatcggcttgctcgctggcgacgatttgttcaatagaccatggatgaaatttgaccgtcacgctgccgtcggtcaccgccagggtaggattcggcaggcgctcatgctcccctttcggcgagctggttttgaccacgatccccggctggctgagtccgtcatcggccagcagcgccagagcgcgggcatttaaggttgccggatcgccgggcaggacgatttcgatatgctcccagccttcatggggataacgcttttcacccggccacggcagctcaacgatatggaagcgccagtgcgccacgcagaccggctccgccagtttgaacaggcaaatgggccggccgttgatcatattctccgacagcagggtgccgcactgctccagaccgcggcgccagcgttccgcagtggtattctgatgacagcgcagggagatatggtcggcgtcgagcccggcgatctccagtcccagtcgcgcagtgaagcgctgaagcgcatcggaaaatcgcgggagatccgccgtaatatcggccagttgttcattttgctgccagtttgccatgggtttgctcgtcaataatgctcgtcagtaatgaaaaggtaatttaccgtgtttcggcctgcggaccaaccgccgccccgctgatgggcaactgaccgacgatggattgcgcacgccggcgcgccgcgcgcaatgctgacggacggggacaaatgcagtatactcccgccctaatttgtccacattatggcgcagcctccctcgggggcaggcgcattacacgtaaggtattccggtgaatattcaggctcttctctcagaaaaagtcagccaggccctgatcgcggcaggcgcgcctgccgattgcgaaccccaggtccgccagtcagcaaaagttcagttcggcgactatcaggccaacggcgtgatggctgtcgccaaaaagctgggtatggcgccgcgacaacttgcagagcaggtactgtctcatcttgacctcaacggcattgccaacaaggttgaaatcgccgggccgggctttatcaatattttcctcgaccccgcgtttctggcggacaacgtcaaccgcgcgctgcagtctgagcgcctgggcgtcacgaaaccgcaggcgcagactatcgtcgtcgactactcggcacccaacgtagcgaaagagatgcacgtcggccatctgcgttcgaccatcattggcgatgcttcagtccgtaccctggagttcctgggtcataaggtgatccgcgccaaccacgtcggcgactggggcacccagttcgggatgctgatcgcgtatctggaaaaacagcagcaggaaaacgccggcgagatggccctggccgacctcgaaggtttctatcgcgaagcgaaaaagcactatgacgaagacgaagccttcgccgagcgcgcgcgcagctacgtggttaagctgcagggcggtgatgagtatttcctgcagatgtggcgtaagctggtcgacatcaccatgtcgcaaaaccagatcacctacgatcgcctgaatgtgaccctgacccgcgatgacgtgatgggtgagagcctgtacaacccgatgctgccggggatcgtcgccgatctgaaagccaaagggctggcggttgagagcgaaggcgctaccgtggtcttccttgatgagtacaaaaacaaggaaggcgaaccgatgggcgtcatcatccagaaaaaggatggcggctacctctataccaccaccgatatcgcctgtgcgaagtatcgctatgaaacgctgcacgccgaccgcgtgctctactacatcgactctcgtcagcaccagcacctgatgcaggcgtggaccatcgtgcgcaaggcaggctacgtgccggactccgtgccactggagcaccatatgttcggtatgatgctggggaaagacggtaagccgtttaaaacccgcgccggcggtaccgtgaagctggcggatctgctggacgaagcgctggagcgcgcccgtcgcctggtggccgagaagaacccggatatgtcggctgacgagctggaaaatctggcgaaagtggtgggtatcggcgcggttaaatatgccgacctgtcgaaaaaccgcaccaccgactacgtcttcgactgggataatatgctggcgttcgaaggcaacaccgcgccgtatatgcagtatgcctatacccgcgtgctatccgtgttccgcaaagccggcatcgacgaaaacgcgatgatcgacgcgccggtggtcatcgccgaagatcgcgaagctcagctggccgcgcgcctgctgcagtttgaagagaccctctccgtggtcgctcgcgaagggacgccgcacgtgatgtgcgcctacctctacgatctggcgggcctgttctccggcttctacgagcactgcccgatcctcagcgcggaaagcgaagagacccgcaacagccgtctgaagctggcgctgctcacggcgaaaaccctcaagctgggtctcgataccctcggtatcgaaaccgtcgagcgtatgtaacaagcaacccggcgaaagccgggttagttttattcggcgcctcgccagcggggcgccctgctcagaagtacttgcgtagatactccgtcagacaaaggatcgccatcgcctgaccgtagggcatcgaggtaagcgggatctggcgataaaagtcgaggtctgaccccatcccggtgccaaatgaggtctgcagcagctccccctgcggcgaaatattctgcacaatcccgcgaatcgctttttcagccaccccggcgtagtgctgcccgacgtaacgcttgcgcaccgctttgagaatcccgtaggcaaagccggcggtcgccgaggcctcaagataagagtgcgggtcgtccagcaaggtatgccacaggccgctgtcgtcctggcattctgctaaggcggcaatctgtgcgtcgaggactgtaatcagatagcgccgtaccgcattcccctcggggagatccaccagttccagaaaatccgggatcaccatggtgagccagctgttgccccgcgcccaacgcgcccgggcaaagttatgccgcccctcatagttccagccgtgaaaccacagcccggtctcccggtccatcaggttctgcacatggagcaggaactggtaggttgcctcctccacatactgggggcggttaagcagcttgccaattttggctaacggcaacacggtcatcatcagcgtgtcatcccacatttgctgatggttctcctccgccagagtcatgtgctgcataccgccctgctcggtgcgcggcatctcgtgcatcgcccactccgcccagctctccagccacggcagatacgccatacggccggtctcttcaaagcggtaagccagggtcagaaacggggccatagtattgacgtttttggtcgttgctccctcggcgaagcggtcggcaaaccagcgatcgatgatatcacgcatctcgatatcgccggtttgctggtaatactgatagatgccgtacagcccaacgccgtgggtccactcccagccggcccagcctttggtatcgatcacgcgcccgtcatccaggcgtagtaaaaattgcccgctctcatccttaatattcaccaggttttgcgtcacgttgcggatcagcgccttcagttcgctgcgggcgataaaacgctcaggctgacgcagtaatgggctatgtttgaccggccaaactttcatgttgttaacctcgggtatatgtcgaattcaaagcgccgcccttaatgagcgccggggcagcaggtttatgacgattcagatagccaatattgttattgccccacagacagtcgtaaggcatccccgccagcagctcgaccaccgcacggtgttccgcactggtctgttccgactgagcgtagccgagctcgcgcattctgagggtctcgctgcgcaggacgctgtgggtgtgcaggttgagcttgaagcgcagcgagacgaggaagccgcaggctaacaccaccagagtgccgacgctgaggatcagcagaatggtatggctgaccccttcaggctgtattttttgcccggaaacaaaccccgacaactgcataatgatccccaccagcatcaccgcccccgcctgcgaggctttgcgggtcagggtcatgatgccggcaaaaatcccctcccggcgctggccggtgatcgcttcgtcgacgtcggcaatataggtgtaggtattccacggtacgtaatttatcccgccgcgtcccagtccggcgacagcagagatgagcagcaataaggaatagacgtcgctcagtccggcgtaatagagcagcgcgtaggagagtgagctcaggccaaacaggaccaccaccatgcggtacgacggcgcggggccaaaacgaatgcacagcgggatcatggcgattactgcaataaactggaagatggccatcgtccccagcaggttcgaggcgacggcggcttcctgcatcagaacaaagaccacgtaataggtaaacacggcattgaagacgtcctgggcgatatagccccccagatacatgccgaggtgctggcggaaaatttttatccgcagcgtagaactcagctcaatcaccaggcgattgaggctctgagcaagggttaagttttgtttttccgcttccgcccgcagggccgcttccgaccacgcctcccgcggtcgttcccaggtgaaacaccagaccagagtcagcatcaccgcgcacagcaccgagaacaccagactggcatagaagaacgagctggcattatctttgccgagccaggagagaaggatccccggcaggaaggaggctaaaatcgccgacatctgcgccatcgaaatgcgcgcgccggagaatttggttttctgtttaaagtcatcggtcatctccggcaccagcgtctcatagggcaccagaatcatggtatagaccatatcaaacagcagataggtcgccaggtagtaccagaagcccatctcgccgacccacatcgctgaatagctgaatacgcaggggatgccgagcagaataaagaattttctgcggccgaagcgcttaccaagccaggtggtgccaaagttatcggtgagaaagcccatcagcgggcttaccaccgcgtccagcacgcgggcggcagcaaaaataagcgtggcctcaatcggggtcagtccgcaaaaggtcgtgtaaaagtagagcagccatgcggcggttaacgccgtcgtgccggcgccgagaaaatcgcccgcgccgtaggccagatagttagccagtccaatttttcgtgttttcatcgccgtgatcctgtgtcttttttttaaaagaacgccgacaatcgttccggatttgccaccggaagggagtgggtacctggctacactaaaagctgtgaaaggaggttacctttgtacttttgccacggaacagtcgccggtggcaaaatgacaaagagatgacgtcgccacttcactcatttataaaacagcatttctttttaatcaaaaggcaggttcattgatgtgatctggctggaaggtcgccgactgacgaacaggctcgcaaatcccgggatcggcccttgcgcagtcgaggaaacaggagtaaagaatggaagaaagggttattccgcgtatctcaaggaggccagatgccttatacccatctgctggttgccgtcgcgccaacgccggagagtcaggtattaattaaaaaagcggtgtcgatagcccgccccgttaacgcgaaagtgagcttaatcactctcgctacggatccggagctgtataaccagttcgccgcaccgatgatggaaaatctgcgtgaagtgatgcaggaagagacgcgggagtttctcaatgagctggctcgccacgcggactacccaatagaaagaatgaccatcgcctgcggcgagctaggccatcatattaaggacttctgccggtcgcaccgtgttgatctggtgatctgtggcaatcacaaccattccctcttctcacgcgccacctgctcggcgaaaagtatcgtcggcagctgcggcgttgatgtgctgttggtttcccttgaaaagggctaacgccggttagcccttttcctgaactaggccagtttagggaaggtggctatcttcccccgcagacggctctcctcgctgcgcggtgaaatatgctgcagatcctcgacaaagcgcgcctgccagttatgaatatcattttctctgatcacgtccagcatcgctgaatgacgggcgatacgttccgccagcggcatgctgagcgcgcgatccagcgcggcggcaacctcgtcgcgatcgtaaggattgacgatcagggcgctggtcagctcctgcgccgccccggcaaactgcgacaggaccagtacgccagggttatccggatcctgcgccgcgacgtactccttcgccaccaggttcataccatcgcgtagcggcgtcaccagcccgacgtcagaatagcggaagaccttcatcagcagcttacgatcaaaatgctggttcagatagtagagcggtgtccagccaagctgaccaaactgtccgttgatgcgtccggctgcggtttccagctggtggcggatatcctgataggcctgcacatcgccacgggaggtcggtgcgatctgggtataacggattttgccgtggtgctgagggtacttctcgagcagcgtctcgtaggcgaggaatcgctccggcaaccctttcgaatagtcaagacgctccacggagaagatattcttcacatttttcagctcgttcttcagctgggccagcttcggcggcagcggacctttagcgttgcgcgtaatttcgtccggatcgatccctatcggataaacctcggtactgaacgccttaccccatgcctgatagcgtttatcgccgaggtcggataggcgagtctgcatagcaatgctgtcgagaaaagcggttctgtcgctttcggtctggaagcccagcagatcgtaatcgcacagttgctccagcagctcagcgtgcggcggcagagcgttaaaaatctccggcgtcgggaacggaatatgtaagaaaaaaccgatgcgattgttcaccccgcgcttgcgcagctcgctggcgaagggcagaagatggtaatcatggatccacagcgtatcgtctggctcaatcagcggcagaagcttgtccgccagcatggcgttaacccgcagatatccctcccaggcttcgcgctgaaagctgaccagatcaaggcgatagtggaaagccggccacagcacggcgttagagaactggttgtagtattcatcatggtcccgttcattaaggttgaacgacgcccatgaaatattcccgcgggagacctgcttgagcggctgctggtcatcgccaatctcgccgctccagccaaaccacagacccccgccgctctcagtgcccccaggatgccgacggccagaccgccagcgctcgattttttatcgtccggtaaggcgatacggttagagactacgactaaacgactcatggtcatccctcctttcggtttgcgcgtcatacgccagatgttgcaaccacgtccttacagcggcggcatccgccaaccgccaatgcgcctgagtttccccggcgccaacttttaccgacattccctgcagttgattaacgacgctgaatcccgcctcgtcggtcaaatcatcgccgacaaaaaccggttcgcggccggcgaatggcgcctcctgcatgaacgcggtaatcgcctcccctttgttgacgccgcggggtttaatctccaccacgcacttgccaagctgtaacgccagcagcggatagcgctgaacaatccgctgcgccagctccagcacggcgctctgctgctgcggggcctggcgatagtggagcgcgaaagccatctctttactctccagctcacatcccgggagcgcttccagcgccgacgtcagctcagccgcgatctcatcgcgcagcgctgtcggcagagagacgatgtaggttttaccattgatatcacggcgctcggccccgtgaacgccggccagcggtagccgccagggatgggttagcgcgtcaagttcagccattgagcgccctgaaatcaatgccaccgcgcccccctgctgctgggccagcgcattgagcgcctgcagcgtgctgtcgggtatcaccacctgatcggggtgcggctggatatcggcaagagtaccgtcgaggtcaaagaaaaaagcgtagtttccggttagcgcaggcggtacagatatctggttatccaccctgtttcctccttatcatggccagccgaagctggttgttaattatatgtgagccatgtaagtatagacagtgtgaccaacctcgccatttttgatagttaccgccagcgaaacgggcgctggcggcaattactctgtaaactaaaaagttgggttaaaattcaggccgcacgtttggctttttgtttgtagcggtcgaagatcaccgccgccagcaggatcaccccgcgcacgacgtattgtgagaatggcgagatattcagcaggttcatcgcattttccacggttccgaggatcaggatcccggccaccacgtaggagatcttgccgatcccgcccttcagcgacaccccgcccagcacgcaggccgaaataacaatcagctcatagccaatcgaggtcatcggctggccgctggtcatgcgcgacgccagaatgatccccgctgcggccgataccagaccggagagcacaaagataataatcttggtgcgcaccaccgggacgccggccaggcgcgccgcctcttcattgccgccaatagccagcgtattacggccaaaggtggttttgtttagtaataatccgaaaaccaccaggcaggcgacggtcagccagatcggcgccggcaaaccaaaccagttggcatagccgagggtgaagaaacgttcatcttcgatccccaccgctttgccgtcggagataatataggccaggccgcggacaatctgcatggtggccagcgtggtgatcagcgcgttgatcttaaggcgcgcaatgacaaagccgttaaccaggccactaagcgcccccagcaacaggcctgcggcgatccccagccacaggctttcgctgagattaatcaccaccgcggtggtgaccccggcgcaggcgataaccgacgccaccgacaggtcaaaatcgccggaggccaggcaaaacagcatgccgcaggccaccatcccggacatcgagatcgccagccccagccctttcatattgacgaatgaagcaaagttgggcacaaaaatcacacagccgataaacagcaccgcaaacaccaccagcatgccaaactgatcccagatgcgggcaaagctaaaggttgagcgggtagccccggacgtagtcactgatgacatcatttactccttactcaggcgacagcctggctcactgttggcatcgcaaggcttaacgcctgctgttcattggcttcttcatgcagcagttcgccggcgatttgtccttcgcgcatcaccacgatgcggtcagcgacgcccagcacttccggcaggtcgctggaggcaaacaccacggcgacaccggaggcggcgaggccatagatcacattgtaaatttcatgtttggcgccgacgtcgatgccgcgggttggctcatcaagcaggatcaccttcatctcttccgacagccagcggccaaggatcgctttctgctggttgccgcccgacaggttcataatcagctgttccgggcccggcgttttaatattcagcgactggatatgttgatcggcgttgtccgcctcccaggcgttgttgatcaggcagccagcgtgaatatgcttgcgccgggcgctgatattgatgttatcgcgcacggaatgcaccggaataatcccctccgctttacgatcctccgggcacagcatcatcccggcctggatggcctgggccggtttgcgaatggagacgggctggccatcgatatacacctgaccgccggttatctgcgtgccgccaaacaggcctttcattagttcgctgcgcccggcacccaccagtccgaacaaaccgacaatttcaccgctgcgcaccgagagactaaccggcgtgcgcacgcccggcgctttgacctcctccaggcgcagccgctcctcgccataggggcgaggcttccagccataaatatcgcccagattgcggcctaccattgcctggaccagggcgtcgtggctgacgctcggcatatcgtcaaaggtgcaaacgtagcggccatctttaaagacggtgatggcatcgctgagggcaaaaatctcttccatccggtgtgaaacatagatgatgacccttccctcctcccgcaactcgcggatgacgcgaaacaggttgtcgatctctctggcggagagcgagctggtcggctcatcgaacgcgataatcttggcgttacgcgccagcgctttggcaatctccaccatctgccattgaccaatggagagatatttcagcggcgtctccgggtcgatatccagacccagatgctccagctgcaggcgggcctcatagttgagcagcgagcgattgacgatgccgcctctgtgcggcaactgaccgagatagatattttcggcgacggtcatctccgggatcagatgcagctcctggtagatgattgccacgccggcattcagcgcctccatggtattggcgaatgccatctgctggccgccgatctgcagatggcccgcggtcgggatatagttgccgctgagaattttcaacagcgtcgatttgcctgcgccattttcgcccatcagcgcgtggatctgtcctgggtagcagtcaaaactgatatcggacaaggcctttacgccagggaacgtcatggtgatgccgcgaaatgagagataaggggtagactgttgcataacgactccgctcttctgcactcagcccccgcgccgcggcgggggccagtttaatcaggctgttacagcccttttttcgccagctcttctttgaagttatcgcgggtaatcagcaccacatcggtcaccgccgtgaacttcggcggctcgacgcccttggtgacccagttgtatagcatttcgctggttttgtagccgtggatatccgggcttggcagcagagaaccatagaagccggtcggctgcgccttcgacagttcgttgacggcatccacgccgttgatgccgatgccaatcacatcgggagctttaaagccctgaccttcggtcgcgcgcacgccgccgaggacggtgttgtcgttcatcccgacgatcagccagtgtttaacctgcggatgttggaccagcatcgagttaccggcgtcgaacgctcccgggatatcgttggattttgtcggcacgcggtagatttgcgcgtccgggaagccggccgccttcagggcatcgatggagccggtggtgcgacggcgcgcggtatccagctcatcggcggtgatcgccattacggcggtgtctttgacatcccagccgcgcttttgcatctctttatagagttcctgcccctgacgggcgccaatttcgctcgccgccatcatcaccagcggtacgctctccatcggtttgcccttcgcattgacgaactggtcatcgacggtaatcaccttcatgtcatagccacgcgctttggcgacaatcgccgacccgagcttgggatcgggggtacagatgacaaagcccttcgcgccgctggccgccaggctgtcaatggcattcagggttttctctccatccgggaccgcaattttaataacgtcaaagcctaaatcttttcctgctttatcagcaaatttccactcagtctgaaaccatggctcttccggctgtttcaccagaaaacccagtttaagattttccgccatagctgattgtgacataaccgcagcgagaccaatggccgccagcgctttagtaaatttgtgcatggtaaactccagctttaattcgctttcatgtagggaaaaatcggaattaacaatttaatcggcatcaaaacaaggcattagaaaaatcgcattccccactgccgttgttagagtagtaatacccggaaattatttctccatacgagagcattatcacatcgcggaattacagtaattgcgtacatacatttagcaaaaaatgacataaaaaatgacacaattgtcatacaattttaccggggcatagcaggatcatctataccatcagcaggcttatccttgtgttgtcagaggatgtttaacggtgggttaaagcactgttatcatcagcgattgacggcgctgctacgggcgatcgcctgtgcgccactcaaatggcaacccacctcgcaccgctgagccacatggcccgcttaatatcgcgaaaaaacggatctttggcgtaatttattccgaaaagaaaaaatatattcctcttgataaaagcgcctgcaacaaaaaataaaaataatgatcatcaacctgaaacattactaatgaaataacttattccgttctcttctacgacgaatctcgtagtcaaatacttatatcttataaacaatctgaaaccagcgagcccctgccaacggcgcacaatctcagccctggtagtttgcacaaataatggtgtaacaaaacgtaaattaccgcgcttgagagttttcttaatttcgttgagcgagtattcttaaatcgtcggcaaatggaaaaaatacccgactcatacggaatgtgtagagttttattattctgcaacagtgccgcgtgtcactattttatcttgtagttatccgcaggatccgctgacgcgcaccagtaaccccttcccggttaataaggatattttttatggcagttccaggaatggcacaaaagctaaacacccaaatgaatcttgagtttcacgcctctaacgtttacctgaacttaagcgagtggtgcgcccggcatcgcttcgacggcgccgcgacgtttctgcgcacccgcgcgcaaagcagcatcaccctcaccatgcgcgtatttgactacctgaaaaaagccggcagctggccgatcgtcaatcccgaccacgcctgtaaccctgagtgcacctcgctggaagatctgtttacccaaaccctgagcgattaccaacagcgcagtcgtctgctgagcggtctcgctcaggaagccaaagcgcaaagcgatgacagcacctggcggtttctcacgctgttggcggaagagcagcagcaggatggcctgctattgcaaagcgtgcttgaggaaattcgtaatgccgataaagccggtctcgggatggagcagaccgatcggcgtctgatggctatcgttggagaagcgcagaaagcgcattaatcaagccgttatcgctctgccagggggagcgcgtctgcgctgccccgcccggtttattaatccattacgtctattttttcttccctattattcctttcaagaataaaaaagttttaactcgatcccattccctcatcaccgttaccccataagggggattagtgagcgcggtcactttttgacgaaccataaagaaatataaaaacagcgtttcaaaaatataaaacacgaggtttattttttatggctagatacacggcttcagcctctgaagggctgcagggaagaccgatcttgttacgccatcagttagcctacggcggcggaaatctgttagggagcggcgcactggcgataagcggcgcatggctactctatttttatacgaccttttgcggcctgacgctgatcgaggcctcatttatcttctccgtcgccagcatcattgacgctatcagcaacccgctgatgggctatctgacggataattttggcaaaacgcgcttgggcaagcgcttcggccgccggcgtttctttctgctaatcggtattccgctgatgatgttctacccgctgctgtgggtggaaggcctgagtttctggtactaccttagcacctatgtggtgtttgagatcatctacacctctatcatggtgccttatgaaacgctggcgacagagatgaccgatgatttctcactgcgttcaaaactgaccggctataaagctatctttggtaagctggccaacttcctcgcggcgtttattcccggccagttcattttgctgtatggcaaagattctgccacccctttcttcctcaccggtctgacctatggcgcgatcctgatcgtcgctatttcctgcctgtggttgtgcagctgggagcgtgagcgcggggaagaggtggaaaccagcgcgaaaaaaggactgctgagcaccctgctgtcgctggcgaaagatatgcgttcgactttttatctacgcgtattccgcaaacatcttggtatgtacctgtgcggctttggcgcggaatggctgtttgcctccatcttcacctatttcgtgatcttcgttctacaacacgatccagcgatggtggccgggctgaacagcctgaactcgattctgcagctgatctctacggcgctgtttatcggcctgtgcgtgaaaaagggcttcagcaaaccctatatcctggcgctggggatcgtgattttcgcggttctgctgtatacctcgctgtggtttttccatctaccgtccggcctggcgacagtgctgatgttcggcattaccgtgctgttcggcctgggtaccggcggggtttactatataccctggaccgtttacaccttcctggccgatgtcgatgagatctacaccggacgccggcgggaagggatctatgccggcgccatgaccttctcaggaaaaattctgcgctcgattgtggtgttctcgatgggggcgatcctgagcttctacggtttccagtcaaaagcgcacagccaaccggaaagcgcggtgaccgctatcgcagtggtattctgcgtcggggtgatcgcattagccctggccgccatcgtcttcagcaagcagatgaagctggaccggaaggcccatctggtggtgctgcaggaagtcgcgcggataaaagcgggcggcaaaattagcgatattgcgccggacgtgcgggttatcgtggaggatctggtcggccatcgctacgaagagtgctggggcaacagcaaattgttcaaagatgctgcccctgcgcctgcgcagaccgtcgtttcccattaaagaagaaggccccgccggtatccggcgaggcctggtattaatgcgtttcttcctgtggagtaaacttcagctcaatcaacgcgatcgctttttgcaccgcgcgaagggtcaccggatcggcagaggccggatggctggcgaagtcgatagctttcagctgagtggtcattttttcacgcacttccaccggcgcaatgacgtcaatgacatcgaggatctgtttgataaccagctggcaggcaaccacatcggaaaccagctcgtcgtgttcggtaagatgttgagacattaattactccttttttcaggagcgtaatagtaccctaaatcgttaacgataataaaacctgccgtcgcaggtttttttatctaccttactggctggcgggtcgtctccagccgctttgcacaggatcacactcttgatggcagtgacaacatgaataccgcgatctcttcccgcgatgaacgtgctttttcagcgccggcgctgctggtggccggtgccttttttatggagtttctcgacgggacggtgatcgccaccgccctgcccgatatggcgagggattttggcgtcaccgcggtcgaactgaatatcggcatcagcgcctatctgattacccttgcggtcctgatcccggccagcggctggatcgccgatcgcttcggcgcccgggctatttttactctcgccctggcgatctttacccttgcctcggtcttctgcggcctctccaccgaggtgcatatctttgtcgccatgcgtatccttcagggagtcggcggcgcgctgatggtccccgttggtcgccttgcggtgctacgcaccacgccgaaacaccagctgatcaaggccatcgccaccctgacctggccggcgctggtggcccccattatcggcccgcctttgggcggctttataacccgctacgccagctggcactggatcttctttatcaatgtcccgctgggccttgccgccatcatcctttcgctgcgcattatccctgatattcgcgaaacggaacggcgctccttcgatctcagcggatttatcactacctcggtcgcgatggtcagtctggtgaccgcgatggagcggctcggcgatcgccagccgcagatctggccgacgctggctctcgccgcgcttggcttcggctgtctgttatattccattcgtcatttccgccgggcggcggcgcctatggttcgtctcgacgccctgcaggtgccgacgttccgggtgacaatgtacggcggctcgttgttccgggcctccatcagcgcggtgccttttctgctccccctgctgttccaggtgggattcggtatggatccttttcattccggcctgctggtgctggcggtgtttgtcggtaatttaaccattaaacccgccaccacaccgctcattcgctggctgggctttcgtcggctactgctgatcaatggcgcgttgaacgtctgttcgctgctggcttgcgcgctgcttacgccgcagacgccggtctgggccatcatgctgatcctttatctcggcggggtgtttcgctcaatccagtttaccggtgtaagcacgctggccttcgccgatgtccccgccgcgcagatgagtgatgctaatacgctgttcagtaccgcgtcgcagctggcggtagggctggggatcacgctcggggcgattggcattcgcctgggcgagcaggtcggcgactggctgcatcttactgaactaccggggatcagcttccgcctgtcgtttgtgtttatcgccttgatctgtctggtagggatgatcgacagcctgcatctggccaaaacggccggcagcagcgtgtcggagaagaagaaatagaagaaaaaataaacgacggaagggccagcggcgctggccctgatgacggttaagcgacgatctggcgaacaaagtcttcgattgctttatcctggcagttttcgaagaagcactgctggaagcgtgggccggagactgcggttttcaccagctgcggatcgatggcgcgcagggtatcgaggtagttctcttttactactgctgctttgacctggttgaggatcccggcattgcgcacctgcggttctttgcgctccggcggatagccttcgccgttgcggccggtaaaggctttttcaaagataaaccgcacattcagttcggcgccccagccgaagcctttggcaaacggcagcgacagcgcattaccgttgttgatctgggcaaacaggaacgcatccgccggatcgatacagtagccgcagaccacgcccggatggatgttcagcgacatcagcgccccctgaccggtaccgcagccggtgaccacgaagtcaactgctttcgaattcagcagaatactggccatgatcccaagatggatgtaggtcagatgatgatcgttctcatcgctcatgccgacgttatagaccgggaatcctttttcgtcggcaaccgcgttaagctccttgaggatgatggcgtttttgttcgcctggctgttctccatcatcagtgcaatcttcatggttattctcctgaatgctgtgcgggcctgcccgcagaatgtcattggcgttgactgcactctactaccttgaaaacaaactttcaaattttatgaaaagttgttttaaaatttacgcagtgcttcacactttcgcaagctccccctgtctgttgacctcagccctctgcatgctggcgcatccgcttcgtcctcccttaccacccgccggcgacaaagtcctgaccgcccaggcaataatgaataataaattaaaagcattctcatttattattaaactgccaatgcgtgttattcccattagcattttaaataaaacatttttaaatttactttttgcaaataattaaataacaaattatagtggcagccaataacatctattatttaattccaggagtgcaacgatgctgaaaacggacatgattgacaaactcaatgaacagatgaatcttgaactctattcttctcttctttatcagcagatgagcgcctggtgcagttaccacagttttgaaggcgccgcggccttcctgcgtcgccatgctcaggaagagatgacccatatgcagcgcctgttcgactatctaaccgacaccggcagcctgccgcggatcaacgctatcgcctccccgtttgccgaatatgcctcactcgacgagctgttccgccagacctacgagcatgagcagctgatcacgcaaaaaataaatgaactggcgcacgcggccatgaccagccaggattacccgacctttaatttcctgcagtggtatgttgctgaacagcatgaagaagagaaattatttaaatcggtgatcgataaactgaccctcgctgggaaaagcggcgaaggtctgtactttatcgataaagagctggctaccctcgacgcgcagaattaatcccccgcgccgcgacagtccgtgtcgcggccctcttaatgtcggcagatcttattttctgcggtagtaaaaccttcctctctggcaataaatttgccttttttctctaaaaacgccaccaactgtgcggcgcttagattctctgctgaacaggtgtgaaaccgcgcctcttcgccaaagcggcggcgaatggcggcctccagcgaggcgaccgtccaggactcacccgaggcgagcatcatctgtaaaacttcatgaccatgaatagaagacataacccctcctgcaaaaaccgccagcttaggccagaccgtcaacccgcgccttgcgccagcgcaggctttcgccctcttattatgtaaacatttcattacacaacttgtaatcccgatttgacgaaagccgtaatatcccctaatctgcgcggcataatttattgttatttgctgtagggatagcgaaaagcgtgaaaaaccgcactctgggcagtattttaatcgtagctggcaccaccatcggtgcaggaatgttggcaatgccattggccgccgcaggcgtcggctttaccgtcacgttgggtttacttttcaccctgtgggcattgatgtgctataccgcccttttgctgctggaagtctaccagcatgtccctgccgatatggggctcggttctctggcggcgcgctatctgggccgttatgggcagtgggttaccggattctgtatgctgtttctgctgtacgccctcacggcagcctatatcagtggcgccggtgaattactcgcttccagcctcaaccagtggctggactggcagctaccgccggccgcaggcgtactgatcttcaccctcctcggcggggcggtagtgtgcattggcaccgcgctggtggatctgttcaatcgcttcctgtttagcgccaaaatcgtcttcctggtgattatgctggccctgctgatgccgcacattcatcaggtgaacctgctgacgctgccggttgagcaaggcctggccctctcggccattccggtgattttcacctcctttggttttcacggcagcgtcccgagcatcgtcagctatctgggggggatattcgcaaattgcgccgggtatttatcatcggcagctttattcctctggtggcctatattttctggcagctggcgacgctgggcagtatcgacgccccggcctttaccgccatgctggcaaataacgctggtctgaacggcctgctggaggcgatccgcgaagtggtggcgtcaccgcatgtggagctggccgttcacctgtttgccgaccttgcgctggcgacgtcattcctcggcgtctcgctcggcctgtttgattatctggcggatatgtttcagcgtaaaaacagcgtcggcgggcgtctgcagagcgggataatcaccttcctgccgccgctggcgttcgccctgttctatccccgcggtttcgtcatggccctcggctacgccggggtggcattagccgtgctggcgctgataatgccggctctgctggtcatgaagagtcgccgagagcatccgcaggctacctggcgggtcgccggcggcgcaccgacgctatggctggttctgctgtgcgggatcggcatcgtggctattcagttcagcatcgctgccgggttgttgcccgcggtgggataaaaaaggggcctgctggccccttgttcatttcgctaagcaacactgcttatactttttaccgctgccgcatgggcagggatcgttgcgtccgactttcgcttcatttcttattggctgcggggcctccaccggctgcggattcgctatccagtactggtaaagcgccagcgccgccggcgtgatacgctcgatgctggcgataaattcatccgccgtcagattatccagcgcgctaaactgttcttcgctgccgtggagcgcgatagcgtccagctccggctggagttcagcgggcaacgtcgaccagtcgctcagcgccacgccgcgcagatagccaaagcaccactcctcgactatggtcagctcctgaccttccgcttcgcgggtgccgaacagcggttcgaactgatcgggataagactccagccgttcggcgatatcgctcatatgctgcagcgtcagattgacaaagcgatcgcgctcgcgatcgttggcccagcgcgggacattatccgccccgccccaaatcgccagcagccactgagcgggttcgatgtcggtcggcgcagagaggatcgccgtcagcaggccatccagttcagagacatccagaatggcgccttcggcggcgtatttcgccagagtgtcatccagccattccagttcgttttcgttcaaaggtccggtattcattcacaggctcgcatggtaaaaatcgggcctacagtagccgaattgccgacagaaagccacccggcgatacctattgcgccggtgtcaacgatacgcgatcaggccaggccgcgcagcgccgacgccacctcacgacaggcctcctcccctaacgaaagcaaaggacggggaagcgagtctggatcgcagagtccgagcatcgctgcggcgctggctatcactcgcaggctaccaccatagcgatcaaagcatcgccataggggggccagctgctcattcagtgccgcagtctgcgccacatcgccgctacgtatcgctcttaccagcgccagtgagcagcggggaaagagtccgccgcagaccgaataccaggcttcgcagccggcctgcaacccggcagtggcccacgcatcgccgctgacgccaagcgtaacgcgagagggaagatgctgacgcagggccgctacacgttcgctcgcctgtggcgcgggcaggccgggaattttaatcgaggcaatggccggcaaggcggcgatgcgcccctgcagctcatccgccagcattacgtgggtagtgcggggattgtcatacaggcaaaccggcaccgagacatgccgacagacttcttcgtaaaaggcaaagatctcctccgcggaaagcggctgataggacatcatcggcagtaataacgcatccgcccctgcctcctgagcatcctccaccaggcgtagcacctcgttagtcgcaatggcgccgacgccgaccatcatcgggatcgaccccgcatgcgccttcgccacctgcaccactcgtctgcgctgctcacggctgagataagcgtagctaccggttgaacctaagatgcccagagagtcgactccggcatcggtaagacgggcgagaatacgaataaacgctttttcatcaaaatcttgctgatgcaaaggtgtcaaaggaaatgcgcaaagtccactgaacatgctgcctccggtaggctgggctgagagtccgtttgatagtagcaaggcgcgatcgttttgtcctgggacaaatgagaaattgactttaaggcaagagttaaccgaaaaacgccgtggcgtcaggctggcgggaaaggtatcagaaagcgaaagtacagaaacaaaaaaaccacccgtaggtggtttcacgacactgcttattgctttgattattctgtatttcccaatggtacccggagcgggacttgaacccgcacagcgcgaacgccgagggattttaaatcccttgtgtctaccgattccaccatccgggctcgggatataaagtggaggcgcgttccggagtcgaaccggactagacggatttgcaatccgctacataaccgctttgctaacgcgcctttaatactgaagcacccgcaactgccgatgctgttaatctggagcgggaaacgagactcgaactcgcgaccccgaccttggcaaggtcgtgctctaccaactgagctattcccgcatcatcaagttatttgctaatcacttgattttgttatcgtctggaagactgtgccgccgttcgatgcgttgcattctacttatctctcgcggtgagtcaacggtatttttcgcaactttgtatcgtttgctgaaaataacggcgaaacgatcactgatcaagcaaatcgccgcgcgccgcgttcaaatactgcagcatcgaccacagcgtcagcaccgccgccacgaggaaaagcgcgatcccggcccactccacccacggataaggacgccacagcatccataccagggcggtcatctgggcggtcgttttcactttgccaatccacgagaccgccacgctgctgcgtttccccagctccgccatccactcacgcagcgcggagataatgatctcacgggcaatcatggtcgccgccggtagcgtgacccaccaggtgtgatagtgttcggcaaccagcaccatggcgatagccaccatgactttatcggcaaccgggtcgaggaaggcgccaaaacgggtgctctgattccagcgacgagcgaggaaaccatcaaaccagtcggttaccgcggcaacaaagaagatcagcgcgcaggcaaacggcgcccagctaaagggcagataaaacgccagcacaaaaaacgggatcaggatgacgcgaaacagagtaagcaacgtagggatattaaattgcatagtgacgggtaactatctgttgtaagtaaaaattagccctatgttgctacagagcccctaatgtttcaacgagtagaagatcttttctgccagagcgtgagagatgcccggtactttagcaatttcttcgacgctggcctgctgtagcccctgcagcccacccatatacttcagcagcatctgacgacgcttcggccccaccccctcgatagtctcaagcgagctggtgctcttcactttcgcccgttttttgcgatgcccggagatcgcatgatcgtgcgattcatcgcgaatatgctggatcacatgcagggccggcgaatccggcggcaggctaaacccttccccttccggctcaaagaataacgtttccagacccgcttttcgatcgctacctttcgccacgcccagcagcagcggatgatgtttatcccaggggacgtccagttcagcaaacacggctttcgcctgggccagctgtcccttgccgccgtctatcaggatcacatccgggatcttgttgtcatcaatcgctttaccatagcgacggcgcaggacctgattcatcgccgcatagtcatcgccaggggtaatgccggtgatgttgtagcgccgatactccgcgcgcagtgggccattgctgtcaaacaccacacaggatgctacggtctgttcgcccatggtgtggctgatgtcaaaacactccattcgcttgacggccggcagctccagtacgccggccagcgcctgcaaacgctgatgaatggtcgattgctgagacaatttggtcgttaacgctgtcgcggcgttggtccgcgccagcttaagataacgcgctctgtcgccgcgcggcttagtctgcacattgattcgacgacccgccagctccgacagcgagtcggccagcagcgtcttatccccaaggttaaagtcgagcaaaatctcccccggcagcgtgcgcatttggctgccctgcaggtagaactggccgacaaaggtctccacgacctctcccagctcggtgccgcccggcactttcgggaagtagcttcggctgcccagcactttgccctgacggataaacagcacatgcacgcaggccatgccggcatcgaaggcgacgccgatcacgtcgaggtcgtcaccggtgttggagacaaactgtttctccgtcacgcggcggacggcctgaatctggtcgcggatgcgcgcggcctcttcgaactccaggttctggctcgccttctccatccgcgcgatgagctgggtcagcacctggtcatccttgccggcgagaaacagccgcacatactctacctgctgagcatactcttcttcgctgaccagcccggccacgcacggccccaggcagcgaccaatctgatactgcagacaggggcgggagcgattgcggtagacgctgttttcacactgacggatgggaaagattttctgcagcagcgccagggtctcgcgcacggcatagccgttgggaaaaggaccaaaatattcgcccttcgcatgtttggcgccgcgatgcatcgccagacgcggatgagtatcgccgctgagaaaaataaaaggatacgatttatcgtcgcgtaacagcacgttgtaacgtggctggtacagcttaatatagttgtgctcaagcagcagcgcttccgtctcggtgtgggtgacggtcacgtcgatttgcgcgatcagcgctaccagcgcttccgttttacgcgacgcaaggttgctgcggaagtagctactgagccgctttttcagatctttggctttgccaacatagatgacggttccgccagcatcatacatccgatacacaccgggctggctggtcaccgttttcaggaaagcttttgcgtcaaaaacatcactcactggcttgctaacgactccgcattacacaggccatggcgaattgccaggtgggtcagctcgacatcgccatgaatgtttaatttactgaacatccgatagcggtagctgttaaccgttttaggactcagatttagctgctctgagatctcattcaccttctgacctttggtgatcatcagcataatctgcaattcgcgttcagacaaactggcaaacggcgattctgtcttttcgggttcaatctgacttaacgccatttgctgggcaatatcggaggcaatatagcgctgcccggacgcgacgcagcggatggcattcaccacttcctgcggcgcggcgcctttactgagatagcctgccgcgcccgcctgcatgaccttggcaggtaaaggattctcggtatgcacggtcaacatgatcactttggtgcccgccacggagcgcgcgattttgcgcgtcgcttcaagaccaccgatcccaggcatgttcatgtccatcaggacgacatctgcggaattagcccggcaccacttgacggcgtcctcgccgcagcaggcttcgccagcgactttaatcccttttatatcttccagaatgcgtcgtatccctgcgcgcaccagttcgtggtcatcaacaagaagaacgttgatcaaaggaataatctccagaatgagggataacgctactgatactttatctcccacatattaccgggttttattgctattttaaaaggcaaaaaaatgccctcgcctcgatttggctctcatttatggcaatgtctgtgcacactaagtggaaagtcattgagaacagtcagttgcccggctcttattttttaacaatactcatacagaaggcacaaaaaacacaacagattacgtagcgcataaatacgaagcaaaatatgtaacaattattaacgagctaaatagatgggggaaattattggcttgccgacggctattacgtattatccgaagcatcaaaacattcacagctcagatgagagaacagaaattaagcacaccttttttttctgtcgcttgtggtatactgcgcggccttcacattgactagagcgcaatagcgcagcgagtaaacgaggatatcgatgagcacaccagatttttccactgcagaaaataagcaggaactggcgcaggaagtctcctgcctgaaagcgatgattacgctgatgctgcaggcgatgggccaggcggatgcggggcgcgtgattattaaaatggaaaagcagattgcacagatggaagatgaggctcaggccgccgtattctccagcaccgttaagcagattaaacaagcctatcggcagtaatcctgtgccggctgaaagtatcactgacagccggtatcacgtctgacacgcagaacggcaggcgcattcagattagcccagtcgccacggcgtagcaggcaatttgcgttttattcggcgcattaaatttccgctgcatattcttctgatggaaattcaccgtattttccgaaatcgagagaatcatcgccacctccgccgaagtctttccttccgccgtccatttgaggatttccagttcgcggcggctgaacttcatctccggcggcatcaccatctcatcttccagacgcagcagcgtcagcaagcttagttcagtcagcgttcgcagacgcagctcaagctcatcttcagggtaaccgcccggcagacgattgttcgcggagacagagagaaatccctgagcatggtttggcaacgtcaggcactgcgtcacgcccttttgcagaccatggtcacgcgccccgtcccacagtgccggcgcatcacgaaacaggctgtcgttccatggcagatggccacgcataaaattctccggccgtaacacaggatctatcgcgaaataattttctgcctgatagtgcgacatccatgcgcgggggtaagtcgactggaacgtaacgcgggggcgggtgaaaggcaccgggtggcgcacacaaagcgtgtagtaatcatattccagcgcttcggtttcacgttgcaggagattataaacctcctcgccggtggccatggactgaaattggtgcagcatatcccgccgccagctgaaaaaatcattgtccctcatagctgtgcaaataactcctgattgataatcattattataaatacagaaaactaacacataaatcttatttatatgtataaaatatcgtagctgtcgcatttattagtctgaaggcttgccattttcccgctcgccgcacagaaacatagcgtttttctcccatcatgttctacaccctgccaagggcgatgggaagcggtgtatacggccgtgggagtcaatagcgcaaagacgtgtcgcgggggcgttaccccgccgcgagagtgggctaaacgcggcggctcccgcgaagctgagccgccgcgccagcccatgctttactgcatcaggaatttttcaaggaactgacgggtacgcggctgctggggcgaagcgaacaacgcttttgcctcgccttgttcgacaatgcgtccctgatccataaatatcgcccgatcggcaacgtcgcgggcgaaactcatttcatgggtcacgatcaccatggtgcgtttttcctgcgccagctgacggatggtgttgagcacctcccccaccaactcaggatcgagagccgaggtgggttcatcaaacaggatcacgtccggacgcatagccagcgcgcgggcaatagccactcgctgctgctgcccgccggagagacggcgcggatagctattctcttttccgctgagccccaccttcgccagcagttcgcgcgcccgcgccatggactcctgcttatcttcaccttttacgatgaccggcccttcaataatgttctccagcaccgtacggtggggaaacagattaaagttctggaagacaaagccgacgtgctggcgcagctggcgaatgagccctttctgcggcccgaggctgcgaccggcgtcgatcgtcacatcgccgacgcggatagtgccgctctccggttgctccagcaggttgatgctacgcagcagggtggttttgcccgagccgctggggccgatgatcgccaccacttcccctttctgtacctccaggtcgataccatggagcaccgtctggccatggaatttttttaccaggcttttcacttctatcgcactcatttcggatcacgctcctggcggttcagctggttttcaaaataattctgcagcgaggagagcactgtcgccattacccagtagatcagggaggccgccagatacatggtgaagacctccagggttcgcgaggtgattagctgcgcctgacgaaacagctccggcacctggatcgttgccgccagcgaggtatcttttaccaggctgataaaactgttcgacagcggcggcaaagcgacccgcgccgcctggggtaaaatggcccgacgcatcgtctgccagggcgtcataccgatactggccgccgcttcccattgccctttatcaatcgaggcgatggccgcgcgcagcgtttccgccgcataggccgcagtattcaacgacaggccgatcatcgccgccgggatcgggtcaagctcaatgccgaactgcggcaagccgtagtagatcataaacagctgggcgataagcggcgtgccgcggaaaatggagatatacatgcgcgccagccattttaccggccagactggcgacatgcgcatcagcgccaggataaagcccagcaccaggccgaaaaacatcccgccaatgctcagctgcagcgtaaagacggcccctttcagcagaaaaggggcggaatcaatgaccagttggatactttcttgcatgctgtcgtttctgtattagaggtgaggatgataggcaaacagcgccggcgctccgccggtgtggacgaacagtatcggcccttcatccttaaagcgcttctgcgtgatgccgtcgataagcccggccatcgctttgccggtatagaccgggtcgagcaaaataccttccagctgcgccagcagcttcactgcggccatcccatcttcgtttggcgtaccgtatcctggggcaaagtagtcatcccacagtataatttcagccttcgcctgtagctcgagactgttggccacggcccgctgcagcgcctccactttcggcaactggtcagcgaccgagcgcgacacggtcaccccaatcagttccgcctgcggcatcagctgttcaaggccgaccgccaatccggcatgggtgccggcgctgccggaggcgaccacgactgacgagatcgccaccgcgtcttcgcactgctggctgatttccagtgcgctttccacatagcctaacgcgccgagggcattggagccgccgaccggaataacatacggacgatacccctgcgcctcaatgcgggtcgccagctcatcgagctgggcggcgggatcggtcagggcatcacacatctcaacctgggtgttaaagagatccagcagcagacggttgccattgctcagatagttctccgcccgggtgccgatgggattttccagtagcgccacgcaatgcagtcccagtttcgcagcgactgccgccgtctgacgcacatggttagactggatcgcgccggcggtgattaaggtatccgcgccctcgcgcagcgcatcggcggcgagaaactccagcttacgcagtttgttgccccccatcgccagcggcgtcgtatcatcacgtttaataaaaatttcgcgcccaaggtgatcggacagacgcgggagatactccagcggcgtcggcgcgccgatcaattccaggcgcggaaagcgggttaagttttgcagtgacatggcccctcctgactcagttatgcttcattatgcacacagttacgcgctaaataaaaaaaggcgcttccaggagcgccttttttcaccgctgtccgttatttcgtcacgtcagcgccaaaccatttctcggacagcgccttcaggctgccatctttctgcatgtctgcaatcgcgccatctaccgctttcagcaggtcgtcgttgcctttacgcagcgcaacgccagcttcctgacgagagaaggcttcgccggttaccgccagcgtattgttggttttcttcaccagatccaacgccgccagacggtctaccagaatggcgtcaatacggcctacacgcagatcctggtatttggtgggatcgtcatcataggtacggacgtccacgccctggacattctgacgcagccactcttcatagttagtgcccagtccgacgcccactttcttgcctttcagatccgccgcggttttaattacgccttcgttacccttcttcaccagcgcctgcacgccggagacggtatatggggtggagaaatcgtatttcttcttacgttcgtcagagatagtgacctggttaatcaccacgtcgatacgcttggagtccaacgaggccagcataccgtcccacttggtcggtttgagatcggccttcacgccaagatgtttcgccagttcgttagcgaattccacttcaaacccggtcagcttgccgtcatccccctgaaaactaaagggagggtaggtgccttcgaggcccacgcgtagggtgccgcgctctttaatctgattgagcaggttttccgccgcaaaagttttcacgctgacgccagccatcaaaacaacggccatcgcgcccatcatcgcctgacgacccagaagtgctaatttcatagataccccgaaggttaggattttcctgtagtgtaaggcgcttaacgccctgacaccaacatcgttacgctacatcttatgcaaatttattatatatgatccgctttagggtatagcgaaaatcagggctttcctcaccctttttgctggatatctcccatactgctaaggtcagcctgttgacgtctggagcatggaagatgaaaaaccccaccttattgcaatgttttcactggtactaccccaccggcggcgagctgtggcctgaggtcgaagcgctggcgcccagcctgaatgaaatcggcatcaatatggtctggttgccacccgcctacaaaggcgcctcgggcggttactccgtcggctatgatacctacgatctctttgacctcggcgagtttgatcaaaaagggtctgtcgccaccaaatatggcgacaaagcgcagttgctggcggcgatcaacgccctgaaggagcacaatatcgccgtgctgctggatgtggtggtcaaccataaaatgggcgctgatgaaaaagaggctctgcgcgttcagcgcgtcgatgagcaggatcgtacgcaaattgacgaggagatcattgagtgcgaggcatggacgcgctacaccttcccggtgcgcgccggacagtattcgcagtttgtctgggactacaaatgttttagcggcattgaccacatcgagaacccgacggaagacggtgtgtttaaaatcgtcaacgattacaccggcgaaggctggaatgaacaggtcgatgatgagctcggcaactttgactatctgatgggcgccaatatcgatttccgcaatcatgcagtgaccgaggagatcaaatactgggcgcgctgggtaatggagcagaccggctgcgacggttttcgtcttgacgcggtcaagcatatccccgcctggttttataaagcgtggatcgagcatgttcaggaggtggccccgcagccgctgtttattgtagcggaatactggtcccatgaagtggagaagctccagcagtatatcgacctggtcgagggcaaaacgatgctgtttgatgccccactgcagatgaaatttcatgaagcgtcgcgccagggccgcgattatgacatgagccagattttcagcgggacgctggtcgaagccgaccctttccatgccgtcactctggtcaccaatcatgatacgcagccgctgcaggccctcgaggcgccggttgaaccctggttcaagcccctcgcctatgcgctgatcctgctgcgggagaatggcgtgccctcggtcttttatgccgatctcttcggcgcttcctatgaggataccggcggcgacggagagacctatgccattgagatgcccgttatcgaacaactccacgagctgatcgacgcccgtcagcgttttgcccatggcgtgcaaaccctttggttcgatcatcctaactgcatcgcctttagtcgtagcggtactgacgacgatccaggctgcgtggtgatcatgtccaatggcgatgagggcgaaaagacgctgacgctgggcgaaaactatggctacaaacgctggcgggattttctcggtaaccgggaagagattgtcgaaaccgatggcgaaggctgcgcgacctttacttgtaacggggggagcgtgagcgtgtgggtattagaggaggtgctgtagttccctgacgccgggcgggccagctatggcccgccaaaatctcagcgcgtggaggccggcgcgctgacgggccccgtcgctcgcgctttggcccacgccttctcgcactccggagtgagacgttcaacacgggacaacgtcatccgatcgtaggagatcgtgttgccctcgcgctcgacaggatagatgtccagggaagcggtcacgttgtagatctcactgtcacgattcatcagtttccccggctgcgcaatcacgcgctgccactggcggcagtcgaaggtgtccccttctttggtgacaatcaggctggcaatggcgtcaggactcatcatcgcgctctgcggccctttcgtttgccagaaacctgcaaggccagccggcgccggcgctttaaccacgtcctcataacgatcaacctgtacgcaaccggccagcgccaccaccatgccagcaaaaaataactttttcatcattcatcccacaagccgataaaaaagtattgtggcattaaagcgttaagccttccacccccaccgcaaagggacaagcgagcaagctagcaaccgctaacgtgggtttcatttgaagtaaggaaattctgaaagtaaaataatactgggcgcgtaaccatagcatctatgggcactttttgtttttaattcggtcacactaccggttcttgactttactttaagagttttcctggcaaattatatgcatagatgcggaatagtttaatggagctaatgggttctttctaaacctactattattatcgcccgcaaggactgcttcgcacagccagtgcgaagtgtatatcgttacgtgttgattgaggatgggtcatgtcaacgatgattatggatttgtgcagctatacccggttgggattgacgggatatctgaccagtcggggaattaaaaaacaggaaatcgttgaggtcaacaatgctgcggatctgcagaaacactgtacgtcgtgttgcccggcggtggtgtttctgaatgaagactgtttcgtgcatgatgatgaaagtaatggcattattcgccagatcattacgcaaaacccggcgacgctgtttgttatctttatgtcgctggcgaacatccattttgaccgctatttgcgggtacggaagaatctgctaatcagttcaaaatcgataaccccaaaagaccttgatgttattctggttaattatcttaaatacaaaaacaccagtgtagggcagttaactttaccgacattgtcactgagtaaaacagaatcaaatatgctgcaaatgtggatggccgggcatggtacttcgcaaatctcaacgcaaatgaacatcaaagcgaagacggtatcgtcgcataaaggcaatattaaaaagaaaatacaaacgcataataagcaggtgatttatcatatcgttcggctgaccgaaaacatcacctccggtattcaggtaaatatgcgctgaaacaaactggcggcgctcccgccagttcagttttacgagacctctttttccacgaaaatcccatccgggtggcctatttcattaaaaaaccagatccccagaggatagtcttccagtgaaaccagatacatcgttccttcactaaacgactcaatcgccagcactacccccgatcgacgtgggccaccgtcggtcttcaccgtgacacgatcgttcacctgcataatcatctcctctatattttcagccagtgtagaacaaaaccacgcaactcgcagcgtcgcggcacgtgactggcgcttttttagaccggctatacttagagaggcttgagcaacgctcagcgagggggtaatgatgaagcaccaattaacaggccagaccggggacgaccttgacgtcaacgtagatgccctgctggcggcgataaatgagatcagcgaaagcgaagtccatcgcacgctggacgacccgcagcgcgccagcatcgatggccgcgggtcacatacctggcgtgagctggcggaggcattcgaactcgatattcacgatttcagcgccagtgaagccaaccgttagcggcaggcgaaaaaaatcccgactcgcaggagtcgggatcaaacttgctaatgcaagaagcacttgaaaattcgttacaccgggaaatccgatgcgttgaaacattatcctcaattattttgcatgacaagagatattcatgacgcaaaatattgagaatgttggcgcctggtgactgaccgggctgcaaggctgatgtgagaaggcttagccgcaaaccggtttcattcgatagcgcgatcgcctgcgatcactttaagataattctcattttgccaatcggcatcgaaacgttttactcacgctgcgctgcgaaaacagacctggttacgcccattttgcttggccagatagagtcgcccatcggccaccgactgcagcgcttcaaactgatactccccccgctcttcgctggcgctcacccctaacgaggcgctaacccgcagcgtcacgttgttatgcaaaaagacttcccgtccctggatacgctggcgcaatcgctccgccaccgccgccgcttcctgcagggtggtattcggcatcacgatacaaaactcttctccgcccactctgcccagcagatcgccctgccgaaccgcgctggacagcgtactggccaccatcgacagcaccctgtcccccgcctgatgaccatagcgatcgttgatgtgcttaaaatgatccagatcgagctggatcaccgccagcggccgtccgctgcgctggcagtcgctggctaccgccatcgcctgttcaaacagagccccgcgattgagcaggcgagtcaaggcatcgtgccatgcctgccactccagcgaggtttgcagaacgctcatgttgcggaccatgcggcggatcaccagccaggagagcaacagcatcaaggtgaagaggacccacatcagggtcagggcgatggtgatggtgccaaagttcccgcggacgccttcccgcagagtgtggatccgcagcagcacgccgtcaaaattgcgcagtttggcccagctgatatagcgcgtcagcagacgcagccctccctggttatcatggacaaacgcgcggctcagcagctcctgctcgcgcggggacagcagggtcaggacattccccggcgcggaagaagccagcaggttcaaatggctatcataaagttggtactctccctcttgtcccccctgcatggcgctaaccaaaaacgctttgatttcactgactgagaaatccatcgccagcacgccgcgccagtaaccggcaaaatccaacggtatcgaagcggtgaccacctgctcttccagctgcgggtcatcgtcaggaaaggtttgccagataacgcctcgccccggattatttcgttgggtctggcgggtaaaccacggagcgccgagggcttgggaatagtgcgtaatcacctgcgactcatcccgcagcggcagggtcgaggtaaaaaagccgctacgagagatatactgcatccgctcggcgaaatcgcgatcgtgctgcgtcagatttagcagataacccagctcgagcgtcgccattagttcatcagccgccagcggatcgtccaccagcaggatagggttgtggccagcgacgctgcctgagatgccaaacaccggcagcgtacgccgattcggtagcgccacccgccaggcctgctgatggcgctggctcagatagcgttggctggccttacgcaatacatcgatatcaagcggctgttcgagcgccgcctgcatcccatggcgaaaaaacatcattctgtcgatgttgaactgcaacagtccatccatttcatgagcgacgttagacagattgttacgctggttggccacgtaggcctcttccaggtcattgatttcacgccagatcagcagcgtggagaaaaacaccactgcgataaaacaagcgttaaccacatgcgccgggcgagccaggtggtagcacttttttaacttcaaccgcagtggcttatccatctttctctcgcaatacgttgcgcaaacctcgcggcgtcagcgccccggtctctgtcgatacccggggcgttttcagggtagaacacgcggcgccgttacgctgcgtttcgccatgctactttccagcgccacgcaggctgctcaccgccttaacgcccgccagcaccaccgcgccgatgataaaacccagcaccaggttggcgacgaccggcagcgtggaggccatcaccccacccaaccccgcgctccagtgctcgatggcatgatgcagcggcgcaataccgtgaacgactatccccccgccgacgaggaacatggccagcgtcccgacgatggacaacaccttcatcaggcggggagcgacggccaggagccctttacccagccactgcgccagcgcactacgtttttccgccagccagtaacccatgtcgtccagcttgacgatcacccccaccaggccatacaccccgatagtgaccagaatcgcaatccccgaaagaataaggatttggttaagcagcggagcttccgccacgatgccgagggtaatggcgacaatttccgcggacaaaataaaatcggtgcgaatcgcgccttttactttgtcacgctcaaaggccagcggatcgcgctccgccagcgcggcgagacgctgctgccgccgttcaggatcctctttgtgtttccgcgcttccagactgtgcagtaccttctccaccccttcgaaacagagaaacgcgccgcccagcatcaacaatggcgtaatcgcccaggggatgaaggcgctgatcaacaaagccagtggcacgaggatcactttgttaacgaacgaccctttcgccactccccagaccacgggcaactcgcgattcgcccgcacgccggtaacctgttgggcattgagagacaaatcgtcgcccagcacccccgccgtttttttcgccgctaccttgcccatcacggaaatatcgtccagcagcgtggcgatatcatcaagtaatgttaaaagactacttcctgccaaaatgattttccttctcttttcatcaatgtctccctcgagtatgcgttaaaaaacggccggtgcccaaggtacaattagtcaatataaatttaacaacctgacgcaaattaaccactcgccagcacgatagttttcacgtttactatatgtcccctttctatctctgcaccgtcgtgaggaagtatgtctacccgtcagcttttaccgctcatcggggcgctgtttgcgctgtatatcatctggggctctacctatttcgctatcgccgtcggggtcgccagctggccgccgctaatgatggccggcattcgttttctcgctgccggcgtgctgttgctggggtggctactggccaccggccataagctaccggcgcgtcgtccgctgcttaacgctgcgctgatcggcgtgttgctgcttgcggttggcaacggcttcgtgacgctggctgaacatcagcacgtcccctccggcatcgcggcggtgatggtcgccaccgtaccgctgttcaccttatgcttcagccgctttttcggcatcgccacccgtaaactggagtggctgggcattgccattggccttgcgggtatcgtgatgctcaacagcggaggcaacctgaacggcaacccctggggcgcactgctgatcctgattggttccctaagctgggccttcggctcggtttacggttcgcgaatcgtactgccgaccggcatgatggcgggggcaatcgagatgctcgccgccgggatcgtcctgctggtggcctcatggctgagcggtgaaaccttaacccgcgtcccttcctggtccgggatcgctgccctggcctatctggccatctttggctcgctgatcgccattaacgcctacatgtttttaatccgcaatgtcaccccggcggtcgccaccagctacgcctatgttaatccggtggtcgcggtgctcctcggtactgggttcggcggcgagagcctgtcgctcattgagtggctggcgctggcggtgattattttcgccgtagtgctggtgacgctggggaaatatctcttccccgtccgcagcgaggctactccttgtaaggcgtcgaagtagtcgtcagttcgcggatcccctgcgtatcgatctgcgcgtcgtgtccggcgccgcagatccactcttccagacgctcggtgagcgccgcatcactcagcctaaggcgcccgcgcagggcgcattcccagatgattaatacccgccagccctcttcggccagcttttgccggtcgcgggcgtcgcgcgccacgttaccggcgattttgtccagccagaatgccgtgcgggtggccggcaccttaaacagatagcagtcatggtgatgccagaaacagccgtgagtaaagataacgcagcggtagtcgggtaaagtgaaatcgggacgtcccggcagcgcgcgatcctgggcgacaaaggtgaatcccgccccggtcagcagcgccgctatccgcttttcaatcgccgtatcgcgcgtggcgatcgcccgcatatttttactgcgcgtcgctttatcgtgaacatccgccatcattatcatccgcttcgcggcgcgccaccgcctgagcgatgcgcggcgccaggagtttcgccaccgcggcgaagaccggaaccaccaccgagttgccaaactgacgataggcctgcgtatccgataccgggatgcgaaaacgcgccccctgcggggattcaaagcccatcagccgggcgcattcgcgcggcgtcaaccggcgaggccgccgctgttgattcagcggatcgtcaaaatgcttctcaccgagcggccggtcccagccgcgatcgacgagaatttcggcaccatctttatagtagcgggcagaaagcgtccgggccacgctgtggggattggcggggtcaaccaggccataaccaaagccattgccccgcgcctgatgcttgcgggcataacgataaagatatttccacagcaccggcgtaagaataaatttcgcatcgaccgtcggctccagtagctcgccaaatgttggccgcaccgccgggtactgcgccgcgatgtcgcgcagcgtaaatccagcatgcagctgcagatcgcgacggaaacccaccagcacgatgcgctcccggtgttgaggcaagaaatggcgcccgtcaatcaccttcgggtcatccggcccggtatgccccgcgtcagctactttatatcccagctcatccagcgtctgcatgatgatacggaaggtgcgcccctgatcgtggcttttgaggtttttgacattctccagcacaaaaatcgctggctgacgagccgcgataattctcaccacgtcaaaaaacagcgttccctgggtttcgcaggcaaagccatgcgcacggcccatcgcatttttcttagagacgccggcaagcgagaaaggctggcaggggaagccagccagcagcacatcatgctgagggatagattcacgaatatgccgcgccgcctcctcgtcgctaacgtcagagcgttggctgagggtaatatcgcggatatcttcattaaaacggtgctgctgcggatcacagtaccagttggccttataggtgcgtaccgcgtgcttgttccactcgctggtgaaaacgcactgtccgccgatggcttcaaaaccactgcggatcccaccaataccggcaaacagatcgataaaacggaacccatagtgcggatgatgggccggcggcgaaggcaggagcgtcgccagatgagcaacttcctgcgggcgcaaacgctccgccgcgcggccaagcgccgccacgcgcttgaggatcgccgcgctccagtgctgttcgccgacgctcaccagttcggcaaccagcgtttttacatcgtagatcgtcatcagctgacgcagcagcgcctcagcgtcttccccggcctgttcagccaacgacaacgacctgtgttccttgcttaacttttgcggcatatcctcaaccaacgcggacgattttggcagagagtaccataaatcaccggtcggttgacgcctgcggtgcaaagcggcgcaaaaccgcttcatccagcgccagcggctccccctgcagctccgcgctgagcttagccataaattcgacgagaaaacgggcattatgctgcgccatcgctttccccttgtcagtttgcatggtttccggcaggcgcagaagtttgcactggaaatggtcgagggcatatttgcggtcatccagcgcccgccgatcagcaaaaggatcttcggcatcaaacaagatggtattcagggcgccggcgacagcgaagaccctcgccagaccaatggctcccagcgactcgagtcgatcggcatcctgaactattttcgcctccagcgtgcgcggtgggatcgccgcgctgaagctgtgcgcctcgatggcatggctgaccgccgggtaacgatccgcaggaaaatcagcaaaggccgactgcagaatggcgagggttttctcggcggccatcatcgaggatcgacttcgctccggatgattttttggcaagctgacgatgtcatgaaaatagcaggccgtgaggagtaccagccggtcgacttcctcccccgcggccagctgagtggcggtcgcccagacgcgacgaaaatgggacagatcgtgtgcggcgtcatcctgcgcatggtgcgtcagtatccagcgctcaaatcgttgctgccagtcaaccaggtccataggctttcctttatctgagggtcagcctcgagcatagcaattttagcgctgatgatcctgctcgccgcgggatggacgcgtataccagacgaccgcgccgagaatagagccaatgccgccgaggaccagcatgcccaacagggcgccaagccatttcccggccgttgttccaaaatcaccctccacgctggcgccgggaacgctgtgaatttttcccactacccaccagtaacgcacaatgacccagacacaatatccgcaaaaagcatacaacgcccagagcgcaagtttccctcccgggctgcgttttgcctgctcttccatctcattcctctccgtgacacaacagactattgtcactcaaaacgtgatacgcatcacattataccgctaacctgcgtcacaggcagcagtttcatcttcgtcttctgcgccttctcgcgacttatgctgccaatgcgcacaggctgaagagatgtccttattatctcccgtacgcttaaagctattcattccttaattatcgcaagctgggttgataattccctggatatttacattcacacaaaataaatttccataatgaataatgagcttgattgttatttgtgcaatttatttcataaaattaacaacaaccaaccaaagacataataaagcattgctatataagaaaataatggattttacacaagcatcaaaatttaatataaagaaccacttagaaatattttgaaatgtttaacattatttatttacatattttattttaaataaagatgaacttagtcgttagtatcggatagtcattccggagggattgtcataattcatagaaattattattaaaagggaatatataatgaaaagaaaagtactggcactcatggttccggcattattaatggctagcgccgctaatgccgccgaaatctataacaaaaacggtaataaactggacctctacgggaaagttgacggcctgcattacttctctgacgacgcttcagaggacggcgaccagacctatgttcgctttggtctgaaaggcgaaacgcagattacttccgagttaaccggctacggtcagtgggaatacaacattcaggcgaacaccagcgaaaaagaaggcgcgaattcctggacccgtctcggctttgccggcctgaagtttgccgactgcgggtcgctggactatggccgtaactacggcgtggtctacgacattgaatcctggaccgatatgctgccggaattcggcggcgatacctacacccagaccgacgtttacatgaccggtcgtactaacggcgtggccacctaccgtaacagcgatttcttcggcctcgtcgacggcctgcatttcgccctgcagtatcagggtaataatgaaaacgccggttctggcgaaggcactaataacggtgggaaacgtaagctggcgcgggaaaatggcgacggttttggtatctccagctactacgatctcgatatgggcatcagcttcggggcagcgtattcgtcttctgaccgtacccataaccagctggcggccgcgcgtagcagccagcgttatgccaacggcgataaagccgatgcctggaccgtcggcgcgaaatatgacgccaataacatctatctggccgccatgtatgctgagacccgcaacatgaccttctatggcaacgatagttttggcggaattgccaacaaaacgcagaacttcgaagtggtcgcgcagtatcagttcgacgactttaatttaccgctgcgtccgtcggtggcctatctgcagtcgaagggtaaagatctctacgcctattctcgctacggcgacaaggatctggtcaagtatgtcgacgtgggcatgacctactacttcaacaaaaatatgtccacctatgtggattataaaatcaacctgctggatgaagacgaccgcttctacaaaaacagcggtatcgcgaccgatgatatcgtcgccctcggcctggtctatcagttctgatccccgtcaaagcccgcgttcagcgggcttttttatgttcccgctccgttgagatcactcttttcgacattgccgctttccaggcgtaccttccctctttatgatgcgtttaagctcgttcgggctaaaagcggcgataaggtgccaaaaggataaagcgcgctaccgcgactctacgctgaaaccaggacgatgatgatggtgataccccagcgcaggcgttatacctgaagctaacggtgttattgaagggaaggttagagcaagaaaagtggcggagagagggggatttgaacccccggtagagttgcccctactccggttttcgagaccggtccgttcagccgctccggcatctctccgctgtgatggttgctataatgccaggatctttggcattttaatagctcccgtttcggtaattgtgttcaagtgacgactttgcgagcaatatgatgtttaaatggccctggaaagcagatgatgagtccggcaacgcagagatgccctgggagcaagcgcttgccattccggttttagcccatctttcgtccactgagcagcacaagctcacgcagatggctgcccgttttttacagcaaaagcggctggtggcattgcaggggctggagctgaccccgctgcatcaggcgcgcattgctatgctcttttgtctgccggtgcttgagctgggcattgagtggctggatggcttccatgaagtgctgatctaccctgcccctttcatcgtcgatgatgaatgggaggatgatattggtctggtccacaaccagcgggtggtacagtcgggacaaagctggcaacagggtcctgtagtgctgaactggctggatattcaagactcttttgatgcgtcaggctttaaccttgtggtgcatgaagtggcgcataagcttgatacgcggaacggcgaccgggccagcggcgtgccgcttatcccgttgcgtgaagttgccggctgggagcatgatctccacgccgcgatgaacaacattcaggatgagatagatctggtcggcgaaagcgccgccagtattgacgcctatgccgccaccgatcccgcagagtgctttgctgtcctctcggaatattttttcagtgcgcctgaactgttcgcgcctcgcttcccggccctgtggcagcgtttttgccacttttaccgccaggatccgctggcgcgtagacgtgagaatggcctgcaggacgaaggcgatcggcgcattgttcactaaaacaacgtgttgagctaaatttagccatttgaatcagcaggttaattttagtgttgacacaaaaatgcgaggccagtagtatgcgcctcgttcacacgattcctctgtagttcagtcggtagaacggcggactgttaatccgtatgtcactggttcgagtccagtcagaggagccaaatttaaaaatcccgctcagggaaacctgagcgggatttttgctttccgtgatcctctccgctccccaagcatgcaatcttatcctggtgtaggtgctattttcttgctatgaggcaagctgaacggccgtgagccccacgctcccgcaaaggcttaaataaaggcggtttaaccgtgccggaccatacctgggtgtaaggcgataatgcgcggttccaaaaaagattggcaacaccgccgcttctgatatctctccgccagcgggtataagcagcatcgtaccgtaggtaccgtccaaggttccgtatgtgatccccgcaggtgaaaatcagcgatgctgctcccaaccttatggctacagactttcgatccggcggtaaccgctgggtctgccgctgcgtagcagacatggaggatgctgaaaacagcctgtccagtgcggcgatgacgcccaggggacggctacgggtggatgtaccgagtccgctggcccgccttattctggtgccggcgctaccggctttccacgcccgctaccctgatatccagatcgacatgggtgtgagcgaccgggtagtggatctgatcggcgacaacgtggattgcgttctgcgcggaggtcaaatcaccgaccagtccctaatcgcacgccatgtcggcgatttgcaaatcggcgtctacgtcgcccccagctatgtggaacgccttggcgctcccgcacacccgcgcgagctgcaaaatactgaccattgcatagtgggattcttgtcctcacgcaccagtaagattgatcctttggtactgtgcagtgagaatgaacgtattgaaatcacgggcaactacgtacttgccgtggatgatggcaatgcttacctcgaagctgggttagttggcttaggcgtgattgcgctgcccaactatatggcggcagcgcatcaggccgttggcgctttgattccattatttacacaatggcggattagcccaatgcctctgtacctggcgtttccaccgaaccgccatgtcaacgccaagctgcgcgtttttattgactggatcgttgaagtgatgctgcagcatgtccccattgccaacaatcagtgacgccatcccctgattcgcttatcagcggcgatgggggtcagcggtagtggctgtggtcaggagtgttttgataatatggattctgcaaaattcattagtattatattctggatattggctatcataagcggtatcttcgctttcatggacaatggcagcccaaaaaaaaatcctcagtaacaagattaagtccataggcatatttgcagactttatcatcccctcctgagcatctcctggcgccctcattaaaacgccatcaccgccactgctgataagttaaggatcggtttcccgatccttattcccaacaacgttgaatgcatcgacagcaaaagagccttctgacaatagccgttaatcagactaaacgacccgctacaaacttccctgcgccgctgtggcgctgatattcaccggcatgccggagcggcgctgcagggtctgctcgacctgggcagggctcactcccggcccctgggtaaagtcgcgcagcgccgaggtcatcggcaaggggacttttctgtcggattcaaactccgcgcggttgcgcgacagcggctcgtgcacctccagccagtgactgccgtccggctccacgctgtacttcaccggctgatcgatcagctgaacccgcgtcccaaccggcacgttatcaaacaggaatttaatatcgtcattgcgcaggcggatgcatccctggctgacgcgcagcccgataccaaagttggcattggtgccgtggatggcgtagagcctgccgatgtagatcgcatacagccccatcggattatcgggcccggggggcaccagcgccggcagggttttgccctctttcgcatactcgcggcgggtattggcggttggcacccaggtggggccttcctgcttacgctctactgccgtcacccagttacgcggggtttcgcgtccggcctgaccaatgccgattggcaggacttcgacgctattgcccagcggcgggtaataatagagacgcatttcggcaacgttgatcacgatcccttcgcgcacggtatcgggcaggatcagctgttgcggaatagtcagcgtcgaaccggagcgtggcaaatagacatcgaccccggggttggcttccagcatattgcttaacccctggccgtactgggcggcaaaactttccagcggctgggtgttattgtccggaacggcaatggtaaatgcgctgcccaccaaacggctcccctccggcggcagcggatagctgacggccagcgcgccgtggctggcaagcagcatcagcgccgtacagagtaatttcacacgccgcatcgtcattttcccttcctcagtcgcgactcacgtgtgtgaattatagcgttatttccactccccgacccgctggccagcatttccttaaatctgatagtcgattgcgacctcttccggctccatcgcctgacgcttaatctcatccagcgacagtccggcattgcacaattcgataaagcgccaaacgtaattccgctgcagctggccccgcttcagtcccaaccacacggtattggcatcgaacagatggcgggtatcaagacgcgtaaaggtgtccgcttcccgggcatcaccggactgctcggcgaccagcccgacgcccagccccagctccacgtaggtcttgatcacatcggaatcctgcgcgctcagcacgatatccggcatcaaccccttgcggttgaacgcctcatcaatgcgcgaacggccagtgatcccctggcggtaggtgattaacggccagcgggcgatcgcctccagcgtcaggggagaaacctgcgtcaaaggatgatccttcggcaccagcaggctgtgatgccagcggaaccaggggaaagccgccagcgtcggatcgttgctcaggcgctcgctggcgatgccgatatccgctccgccgttatgcagcagcgcttcgatttcctgcggggtaccctgcaccagctcgacgcgaacatctgagaacagctcgcggaaagctttaatgaccggcggcaggctgtagcgcgcctgagtatgggtggtggcgatagttaagacgcctgacgcatcgttagtgaagagatccgccagccgccgaacgttactggcttcattgaggatccgctcggcaatcgataacagcgctttacccggctcggtcatgcctaacaggcgtttgccgcggcggataaagatctcaatccccagctcctcttccagttcccggatatggcgactgacgcctgactgcgaggtatagagcatattcgcgacttccgtcaggttgtaatcctgacgggccgcctcacggataattttcagctgctggaagttcaccctttcctccgggccaatggacttaacgtatctgctattgttaaagtctgttgtcccaggtaacaaataataaaaaccagcaacttattccttaagagaatataccctaactgaccagctgcagttcacggttttccagcgatgggcggctcaccagagacagcaggatctctttcaccgcctgcgcctgcggcgacagactgccgcgagccgacatgttcagcgacagcgacaggctcattgaaggcgtgctgatccgcgccatccagccgttcgccgccccgcacagggaacgggcagcggattccggtaacaccgtcgcccccatgccgctggcgatggccgcggtcagggtggtaatggattcgatctcgccgataattttcgccgatagacgacgcagggtgaatgcctcagtgacccgcgcccgcactgcgctgtaatcgcgcggcaggaacaggttcatctccgccaccgccgtgagatccacgctctgccccgggcagtcgcgggtgccgaccaggtaaaggtcttctttcagcagcggctggctgacgatgcctgccaccggcgaacgctcatagagcaccgccatatccagctggcccgccagcagcttgtcattcagcgctgtgccgctgctctcctgcagatagaccatcacctcaggcaactcattgcgcaccgtttgcagcaacggcatggtaatggcggaggccgcggtgcctggcgccaggccgatcgacacctgaccacgcagcgtctggccgacgttattgaccgccagctgcgcctgctcgcactggcgcaggatagtgcgcgcatgggtgtagagaattttaccggcttccgttggcgtgacccctcgcttggtgcgtatcagcaactgctggtccatttcaccttccagggtcgcgacctgttggctgagggccggttgggcgatatgcaagacttcagcggcctgggtcagactgccgatatcgacgattttcacaaaatatttcagtcgtcttaagttcattttgcctcctgtaaggaacgccagcgtcaacgctgggagtatgatgcactggcttttgcaatttgcttgccagctttgcatttcctcggctgtcgcccgccgcaggcagtgttataagggatagtgatagcaattcggtttttatttgcccggtaagcagattgtggtatgccccattaggggtacattcgcactacaacggtgcaacatggtgaaaaaaacagcgcgtgggtggcgattgctgaaattgtcagcagtcgaacgcaattctttgaatcaggctttgacaaggccggatggcatcgttaatatgcgccccgttcacacgattcctctgtagttcagtcggtagaacggcggactgttaatccgtatgtcactggttcgagtccagtcagaggagccaaatttaaaaaagcctgctttcgagcaggctttttgcttttcagcgccggtacttctgccggaaggcgaatggccaccctccggcggttgcggctttagcgtaaactctcttccttcagatctatctcccgcagcacctcataaaaagtgatatcgctgatgttatgggcgcggcgcagccggaacagttcctgacgctgggcgataatgacctctcgttgcatatatttctccagcctggcgcgcttagccagctccagcccgacatcctgcccctcgtcattgtcgttatagtgaagccgccgctgataggtttcgagcagcatattgccggcatcggcccgcagggcctgctcactgggatcctccaccggctcgtccagtagcgcgttaagacggttaatggccacctcggtcatcacggcgccaatgtcgtccttaccggtgtcatgcggtagatcatcggcaagataacgagtcataaacggcaaaccgatagccgccaccaccagcgacatcaggatcaccgccatcgaaagaaagatcagtagttcacggcccgggaacggcgaaccatctgccagcaccaccggcagcgtcagaataccggcgagggtcacagagcccttcactcccgccagcgccatgacggcgaggatactgaagcgtggacggacggtgatggccttgcctcgacgtttgcggcgaaaaattgtcagcttcatcgacagccatacccaggcgaagcgcatcagaccgagcgccagggtgatggccacggcgtacagcagcagataccagggcgaagagacgccggcctggctggctaccgccggcagcgtcctgagcatgcgcggcagctgctcgcccagcatcagaaagatcatcccgttgagggtggtctgcagcatggaccataccgcgctgcttttcatgcgcgtcgccggaagccggggccccgacagctgctcataatgcatcgcaatgccggcggcgacggcggcaagaatgcccgagacatggaacgcctcggccagcaggtaggcggcgaaagggataagcaggctgatcaggatctggatggctggctcctcgcgggtgcgccgaaccagaaagttattacatttgccggtgacccacaccaccacgaggccactgaggatgcccccgaaggccatcaggaaaaatttcaccaccgcgtctcccggggagaagctgccggtcagcaccgcggcgatggcgaagttaaaggcaacgagccctgaagcatcgtttaacaacgactccccttcgagaatatgcgccatccttgagggaagcggcgagctggcggtcattgccgataccgccaccggatcggtaggcgacagaatagccgcgagggcgaaccctgccgccacggtgatagccgggatcagccagtgaataaacaggccaataccgagaatagtcaccatcaccaggcctatcgccagcgataaaatcggcttcatatcgcggaaaaaagcgtctttggggatgcgccagccatcgaggaacagcagcggcgggataaacagcagtaaaaaaatatgcgggtcaaaatcgacctgaaagccactggcggccagcgcggcgcccgcggcgatttggatcagcggtagcggcactttaacgggcagaagatgggacaggaacacggtcaccacgatggccatgataaagaccagcacgatagcaattagcgacattcatcccctcctctgacggcaatattcattctgtacatcaggctgttaatcctttttcgcaggtgttgtttcggtaacagattatttacccagtcaccgataatttaagacagacgtcattgtctgccggcgataatatttaaactgaggtggcaaccggtgccggttcaggggtgacaatgtcttttatcaagccgcgtttgtcaatccgctatcgtctgcaaatcatcgccggccggcattccggggagaagtcctcacaggactgtcgatcggggacttcgcaaattagcctcttcacatggacaaaaccactcaaccgctccagccctccgctgtttatatattcccaatattattaattcgtattatgcattgtgaatatggatattaatgaccagtctaatatacccggcagagttatatttcgtgcccccgctggcagtgcgaaccacgtatttgcgataaataattcttaacgcccccccatttcaggatgattggacagccagccttacgctacgcgcaatgcttgccctccccctgaattgggcgtaccctgacaaacaattaaaccacacggtctaaatcatgaatcccaatacctccaccgtcctgaagccccgccgcggccgtccacccaaggtcgatcgccagtttgacgatacgcgtcaggcgctgattcgctcaggccttgaagtgctgaccgaaacgggctatctcgcggcgggtattgatgcggtgatcaagaatatcgccgtgccaaaggggtcgttttatcattgctttaaaagcaaagaggcttttggcctcgccgtgcttgccgcctatggcgacttctttgcgcataaattagataaattcctgctggacgacgccgtgccgccgctggaacgaatggcggcctttgtgcgtcatgccggtcagggaatggagaaattccagtttcgccgcggctgcctggtgggcaacctgctgcaggaagccccgttgttacccgagacgtttccccaacggttgatggctatcctggcggcatgggagtcgcgcgtggcgcgctgcctgcgcgaagcgcaggcagccggggccatcgccagcgacgcctcaccgcaggcgctggcccaggtgttctggatcggctgggaaggcgcggtgatgcgcgccaggctggtccagtctgccgcaccgcttaaccagtactgggatttttttgcgcacagtatgacaacaaaaacacctgcacaggacggcgctagcgccgataacccccttccgacgaggaatactctgtcatgaaagcattagttctggaccagatcgacaaccgcaccgtcgccaccgtcaaagatatcgacctgcccgctcttgccgaaggtgacgtccgggtcgccatcgactggtcgagtctcaattataaagacgccctggcgatcaccggcaaaggcaaaattatccgtcagtttccgatggtgccgggcattgattttgccggtcaggtgaaagaaagccgcgatccgcgctttgttcccggccaggccgtgatcctcaccggctggggcgtgggcgaaaaccactggggtggtctggccaccgaagcctgcgttaaaggcgactggctggttgctctgccggagacgctcagcgcgcgccaggcaatgatcatcggcaccgccggctttaccgcgatgctatgcgttgatgctctcgttagtgcgggtgtcacccctgatagcggggatatcctggtcaccggcgccagcggcggggtcggcagcaccgccgtggtgttgctgaaagcccttggctaccgggtgacggccgtatcgggccgggaatcgacacacgattaccttcgccagctgggcgccgatacgatcctgccgcgcagcgacttcgcggagacccgtccgctggagaaacagctgtgggcgggcgcggtggataccgttggcggcccggtgttggccaaagtgctggcgcaaacgcaatatcgcggctgcgtcgccgcctgcggtctggccgggggtttcgatctgccgaccaccgtgatgccgtttattctgcgcaatgtgcgtctgcagggggtggattcggtgatggtgccgaccgctgaacgcgacgctgtctggcagcgtctggcccagcttctgccggagagctactaccagcaggcggccactgaaatcacgctggagcaggcgccagcgtatgccgcagatttcctcagcaataatattcatggtcggacgctggtcaatatcggtcagtaatcctcttctcccggcgcccgtgcggcgccggatcccgagagggatcaaggcatatcatttccttccccacgggattatgatgacgcgaacgaatagctctgcgagtggtaaaaaaagtaaatggatgtcataagcatcattatggcggcgggcaagtcgtccgttgacgtcgcgctgtatacgctgttgccgatcatggtgatcatgctgatcatcatgaaataccttgaggtccgcggtatcctcgatgtgattgttcgctgggtggccccgctgctgaagcccttcggcttaaccgggatgagcgccttcgccctgatccagattaattttgtcagctttgccgccccgctcgccacgctgtcgattatggataaacgcggcgtctcggaccgacaaatggccgccacgctggccatggtgttcgccatggggcaaggcaacgtcttctatcctcttaccccttttggtctgcactggctggcctcgatcgttatctcggtggtcggcggcctgtgcgcggccgccgtcgcctggcacgtcaccggacggcgcttatcggtcgccgagaacccccgcgcggaagcgctgccgaacgccgagcagaacagccagggaattctggccgtgattaacagcgccggctccgacgccatccgcctggcgctcggcgcggtgccaatgctgatcctgtcgttaaccatcgtcgggctgctgcagggcgccggggctatcgacctgctgcagcagctgctgaagccgcttctcagctggctgcacatcccccagaactttgtgctaccggcgctggtgaagtgcgttgccgggggcaccgcctactttggcgtcatttccgagctgatccagcagggcaaagtcaccgtgggccaggtcaacgcctcggcaggtctactgatccagacctttgatcttcccggtatcggcatttttcttggcatcagctcacggtttgtccgcctgttccgcttcgtggctcccgcggcgatcgtcggtatcctgctgcgtaccgttctgcacctgatcctgttttaacgcctctgctctggcctgcgctttcaggcaggccgccaccgccgcctgttcgccgcaggcgatgcgctcatcgacgcgcgtcatcatccatggaaagaatggattggaggtgacgcgcattaacgtctccagccccacgctcagcgtcccggtctctccgcgcagtgaaatggtgcccaggctaatgccgtagcggttcttctcgtccggctcgcgaccatacagcgagtcgctcaggggaaacggcaccgccacatgcgacaaagagtacatatccaccggccaggccagatgtaaaggataacgatgctcttcccgatcctgggccagcgtggtccgggcgacggtctgcagcgtgtgtgccgtcgcgttggtcaccaccgtggtggtataggcccgcggcgccgggggcagcagcgtattcaccgccgcatagagcgcagggcgaaacaggacccggagatccgccgcctggttaatatcgaacaccaccagctcgctgccgttatccggcagataacgatacagggactccaccaccgcgcgggtgctgaccgtggaatccatcaccgactgaaaggtgaggatcggcggcagcgctttcagctcgccctgccgggccgcacggataatctgctgctgcagcgcctggctcaataaccacgattgtctcgccgccttgaccggaaaggagttgtacttgaacggattaaactcaggcgccacgttcagccaggccgcgcgggcgaacgccgggaagacggacggtagcccggcgaggccggcgaaacgggcaaacgcggtcacgccgatcatcggcgacagcagaatgatctgctgcggctggcgcaagtgattgtcttccaggctatcgagggcatacttgagcgccagcgcgccgccgttagagtagccgaccagatgcagcggcacgtccgccccggcaaggcgggtcgcttcgcgtaccgccagacgcgtcgccgccagccaggtctcccagtcaaccgccgttaacgcccccggcgcggtgccgtgtcccggcaaacgcggcgccaccgccacataaccccgctgctgccagagttgcgccagatagcgcacgctgtagggcgaatcggtcaggccatggaggagcaccacgccgccgcgcggcttgcccagcggcatcagcacaaaagaacggttccagtcctgcttaaactgccccggccagacccggctgtgacgataaaagcggttgaccggggttttatcttcctccggcaaagcctctgtcacctcacgctggagatcggcgaaaatcgtcttctcccgcgccagatactgggcaaaggtcgcctggtcgatctcttcggccgacatctcgttgccactccaggtatgccagcgatgcagggacgggccgcgttgggactcatagatccgcccggcgagaaagaccaccagcagcgccagtaccgcaatgctcccttttttcagcagtgagccgataacggcgccggacgttcgccagtgtcgaaatagatgcttcatgacgctctctcttatatttattgcgtagccggacttatcagccctcttcctgacaggctattctcacggtctgcttttcagcatagtcatcgcttcctgcaaattaaacccggcagatcattgccccccggcataaaaaaacctagcgcacagatcaacaatcggttgcgtatttttaaacactgcataaaccaaggggataatcttattgtcagatttttaagaaacatgaattatcgacgcacatgtcgctatgagaggataaaaaacagatggagtggtgggtaaaaaaagtacaggacaacgcttcggccagcctctgccgcgtcgtgcttcagagcggtgcgctagagatgatcgcagagattgaagcctgtcgcctccgcctgcgggaaggggataaactcactccgctggccgatgcgcgctattgtctgaataataatccgacgcaaactttgaagatccgcaacgccactcattatagcagcgagcgttggacaaacgccggcaaataacacgagcccgctccctttactggttatggtctgagtatcgtcgcatttgacagataaattctccttcgcccttttcccgctgtgacatactatcgggaatgtcagcagacctgaaacaaggagcgaatcatgaatatcaaggccgccagtctgaccccggaacaagcgcttgccgagctggaagcacgctatgaagcctcggtcacggcgttacgcaaagccatcggcgactatatcgaccataatacgctccccgataccgaagcccgcgcggaaggtctttttgtctatccgcagctgtcggtctcctgggacggcgccgatcataaagccctcaaaacgcgcgcctggggacgtttcacccatgccggttgctataccaccaccattacgaatccgaaactgttccgcaactatttgctggaacagctgaccctgctgtatcaggactatggcgcgcatatcagcgtcgagctgtcgcagcatgagatcccctatccttacgtgatagatggttccaccctgacactcgaccgctcgatgagcgccggtctgacgcgctatttccctaccaccgagctgtcacaaattggcgatgagaccgcggatggcctgttccatcccaccgagttctatccgctgtcgcactttgacgcccgccgcgtcgatttttcgctggcgcgtctgcgacactacaccggcacgccggcggaacacttccagccctacgtgctgttcaccaactatacccgctacgtggatgagttcgtcagctggggctgcagccagatcctcgatcccgacagcccctatatcgctctctcctgcgccggcgggatctggatcaccgccgagaccgaagcgccggaacaggccatttccgatctggcgtggaagaagcaccagatgccggcctggcatctgatcacccacgacggcaaagggatcaccctgattaacattggcgtcggcccggccaacgccaaaaccatctgcgatcatctcgcggtactgcggccggacgtctggttaatgatcggccactgcggcggcctgcgcgaaagccaggccatcggcgactatgtgctggcccacgcctatctgcgtgacgatcatgtactggatgcggtgctgccgccagatattccgatccccagcattgccgaagtgcagcgcgccctctacgacgccaccaagcaggtgagcgggatgcccggcgaagaggttaagcagcggctgcgtaccgggacggtggtcaccaccgacgaccgtaactgggagttgcgctattccgcttcggcgctgcgctttaatctcagccgggcggtagctatcgatatggagagcgcgaccatcgccgcccagggctatcgcttccgcgtcccctacggcacgctgctctgcgtctcggacaagccgctgcacggtgaaatcaagctccccggccaggctaaccgcttttacgagggcgctatctccgagcatctgcagataggcatccgggcgattgacctgctgcgcgccgagggagatcacatgcactcgcgtaagctgcgcaccttcaacgagccgccgttccgttaatcgtcgatgacgtgggaatcgtgagataaacgctgacgttacccgccagggagcgtcagcgtccggataagcgaaacaaacgacccggcggtgtttgtccacggaagaaaggcggtagacagaaaagcaaaaagcctgctcgaaagcaggcttcttaaatttggctcctctgactggactcgaaccagtgacatacggattaacagtccgccgttctaccgactgaactacagaggaatcgtgtgaacggggcgcatattatcgatgacgcccggcgctgtcaaagcctgttttcaataaaatgaatcgtttgccgaattattcttcactttgcgcaaaaaatggcgattagcctcgcaaacggctcagctttcctccgatgaagccttcacgcgcggatatttccacagccagcggccgctcaccatgcggaaataaaacagcacgccgcgcaccgcccagtcgagcaccatccctaaccagacgccaatcacccccatccccagcacgatgcccagggtatagcccgccaccacccggcagccccacatgccgagcatcgacacccacatggtgtagcgtacgtcacgggcgcctttaaaagcgcagggtaaagtccacgacagcgaccagatcggcataaacagggcgttgagccacagcagctgtttaaccacttcttttacatcttcttcatgggtgtagaacgaggcgataaagccggcgaagggggcgctgccccaggcgatcagcgtcagaataatcgtcgacagccaaaatacgtgccaggcctggaattcagcctgaccaatctgcccttttcccagccgcttgccggtaatgatcgtcgaggcggagccgagggcgttgcccggcaggttaattagcgaggccaccgaaaaggcgataaagttgccggcgataacgttggtgcccatcccggcgacaaacatctgggtcagcagcttgccgccattgaagaggacagattcgatactggccgggatgccgatccccatcacctcccagataatggcgaagttaaagggtttgaagtaacccttcagcgacagccgcagcgccggattgaggcccaccatcagcacccagatcgtggctatcgcgccaatatagcgggcaatggtcagcccaagcccggcgccgacaaaccccagccccggccaggagaagatgccgtagatgagcacgctgctgattaagatattgaggatattcatcccgccgttgatcagcagcgggattttggtggtgccggcgccgcgcagcgccccgctgccgatcagcgcaatcgccgctgccgggtagctcagcgccgtcagttccagataggtcagcgccaggtccttgacctgggcggtggcatcgccggcgacaaaatcaataatctcctggccaaaggcatggatcacccccgccagcaaaatggaaaacagggtcataatggccagcgactggcgcgcggccgccctcgcccgccgccgatcgcgcttgccgaggctaaaggccaccaccaccgtggtgcccaaatcgatggcggcaaagaaggacatgatgaccatgttaaagctatcggccagccccaccccggccatggcctcttttcccagccagctgacaaggaaggtgctcaacacccccatcagcagcacacaggcattttccagcagaatgggcacagcgagagggctgatttcgcgccagtacagcacacgataacgctgacgttttttaaaccaggatgtccgttcgacggcctggcgtacggcggaggtgacgttcaagagagaccttagtgagaaatgttgaaacaacatttcaaatgatgattgagaaatggatatcctgcaaagtattttccgtaataattgtcggaaatgacaacaaattgtcgatggaagcggcagttgcacctgaacaggcgaattgatgtttgacaaaagttttttcgccgctaagatacgactccacacgattcctctgtagttcagtcggtagaacggcggactgttaatccgtatgtcactggttcgagtccagtcagaggagccaattttctgttttcatgcatccttgcgaatctttatctgatgttgattcaacaggttagtgtgaaaactcttctcggtgcattttgattttaccctacgcatcgggaaaaattggtggtcaaatctggggtcaggttagttcgataatggagtgacccccatatgtcccttaccgacgcaaaaatccgcaccctcaagccttctgataaaccctttaaagtctccgattctcacggtctgtatctgctggttaagccgggtggctcccgccactggtatctcaaataccgtattagcggtaaagaatcccgcattgcgctgggtgcctatccagccatctccctgtctgatgcgcgacagcaacgtgaaggtatccgtaaaatgctggcgctgaatatcaacccggtacagcagcgggctgctgaacgtggctcacgaacaccggagaaagtttttaaaaacgtggcgctggcgtggcataaaagtaacaggaaatggtcgcagaacaccgccgaccgtctgcttgccagcctgaacaatcacatctttccggtcatcgggaacctacctgtatcagaacttaaaccccgtcatttcattgacctgctgaaagggatcgaggaaaaaggtctgctggaggttgcgtcccgcacacggcagcacctgagtaacataatgcgccatgcggtccatcaggagttaatcgatacgaaccctgcagcaaaccttggcggcgtgaccacacctcctgtcagacggcactatcctgccctgccgctggagcggctgcctgaactgcttgaacgtattggggcatatcatcagggccgtgaactgacccggcatgccgttctgctgatgctgcatgtgttcattcgctccagtgaactgcgtttcgcccgctggtcagagattgatttcacaaaccgagtctggacgatacccgcgacgcgagaacccattattggcgtgcgttattccggccgcggggcaaaaatgcgaatgccgcatatcgtccccctctcagaacagtccatcgccattctgaaacagattaaggatatcaccggtaataatgaactgatcttccccggcgaccataacccgtataagccaatgtctgaaaacacggtcaataaggcactgcgggtgatgggttacgacacgaaaaaggatatctgcggtcacggcttccgggcaatggcatgcagtgcgctgatggaatcgggtttatgggcaaaggacgcagtagaacgccagatgagtcatcaggagcgcaataccgtgcgcatggcttatattcataaggcagagcacctagaagcccgcaaagcgatgatgcagtggtggtcggattatctggaagcatgccgagaatcttatgcaccgccttatacaattggtaaaaataagtttatcccataatatactaacgaatcccacactctggcaaattaccaccacctccacaggaggtggttctatatagacttttatcaacttcatgacgaaaaacacctattttatcccaaaagaagacaatagagtcacagaggaatcaaagagcgactcaattgtctttggacagtctggttgtgaggttagaaaacagttactcctacaccattaaatagggcgcaatgctcgctaatttctcccgggtttctgtcagttcgcgttccggcgtagattgcgcgatgattcccgcccccgcctgtatccagcagcgctggctatcctgaaatacggaacgcagaactagcgctgcatcaaagcgcgtatcgtccagcagcaggattgcgccggaataaagctctcgcggcgtcttctcaatttgcataatcgcgttcagagcagcatttttagggatacctgaggcggtaatcgacggaaacagcacggtaaacgcatcccaggcatccttgttttccgcaagctgaccgctcacgccagaccccagatgctgaacgctgccgcgctggcgaaccgacattaaatcttcaaccactacgctgcccggctggcaaacggcctccagttcagcaatagcttctttgacagaaaggatatgctcaagcacctctttactgtcgtgcagcagttctgcctctttcgccttattatgctccgggtttcccatgcgatcgcgggtgcccgcaagcggttcagtgaccactttattgcccgtcactgacatcaccagttccgggctaaagcccagcgcttcgcgtccttcctgacggaacataaacgagcgcacaggtgtgtttgcctgccgcccgtataacagcgtggcgggcatatcaatccgcgatggcaggggaatggcgcgcgagacaatcactttgacatactcgccacggcggatctccgcaacggcgcgcgcaacctgttgtttatatgcctcaccattgagggcggtatccaccgccagtggtgcgttctgcgtcgttgtaccggcctcttttacccactcgcacaaacgtcggcacccgtcggcggagtccgcataaacggtgacatttcccttttcaaaaataagttcttcacggggaacggttaacgtcagcagcggccactccccggcgttaaaggcaatcccccgcgcatgcgccgcaaagttgaacccaacctgtccatatacccgacgtcctttcacctgaggatgcgccataaaacgacgcgcgcagtcggcaatggaatccaccgcccatttttgctccccggcatcatcaataaatgtcgcctgcgttccgtcggcattaatgtgcagccgtgcctggcaccctttgcctaaataccaacagggttgacgctcatagacataacactcttcttctgcgaactggcgtaaaacgccagaaatcgtcggtagccattgttcctctggtaacgccagatgtagaaattcactgattttcatcccttacctctctgtgttattcccggatcaatcaattgcgcttgtcatcagttctcttgccgaatgcagccggatataagcaacccacgccgccagcaacgtgaatgccccggcaaacaggaagcaggccgcatagccaaaatgttgagcaacaacgccaccgataacgcctgccagaatggcgattgccgcgtcagtacattgaaagagggtgaagtcgacaccggcctgcaaaggcgatgaaagcgacatcagcgtggcgtaaagacagaccagcgcgcaggccagcgaaatggactggacaatgaccagacactggagaatcggcagcagcagatgacccggcgccatcatgagcgtcatcaccaccgccagcagcgcgatcccctggacgccataagccgtcaacagcgctctgccgggtgaggtgtatttcatcagcaatccgccggccagcgttcctgctatgcccgctgcaatattgccgccgctgaacagcgcgcccaatgcggacatgctcaacccatgatccaacaacagcggtgccagaagaggcagcacaaaccgcatgcctgaattcagcatcaataccagcagtaagcccaggcgcgcctgcttcctccttagcgcataacctaacgccggaacatgcgggatagtcgctgttcgcgtcggctccgtaatgcgccacagcgggagtgacagcgccataatcagcaccgccatcatcagcatggcgacaggccagccggatgccgccgacagcatcaggaacaccccgccgccgcacatcattcccagatagctgccgccgacctgcacgctgtttccccagccgtaacccgtgcgggtcagttgatcgacgcaaaagccgtcgctggcgatatcaatggtggaggcgaccgtgcctgccaccataaacagaacaaataacgcgacgatttgcgtatcggggaatcccccttctcgcccaaaccagccaatcgctgcggcaatagtcaggatcgccgctagcgcgacctgaccacgcaggattaacatgcgggaacggcgttcctggctaccgggcggaagccgccagcgctcgatccatggcgcccaaataaacttcagcgcccagggcagcataaacagggttgtcgcaccggcaagcgccagcgaaccgccagcagcgcgcaccagcgcgggtaaggactgcatagacagcgccgataccagactctgcgtcacatagacgccggcaatagcaaaaatcacccgcccggtcgtcaacgtcagcggtttcacattcgactgaacatcactcatgcacccactctccagacgcggaaaccccgtcgtcgcgccacacgcgcgcggccatttgcgcctgccacagcgcctgataacgtccatgatgtgagagcaattgcgcatgagtaccctgctcaaccacctgtccctcttccatcaccagaatgtttccggccccggcgatggtggataaacggtgagcgatgataatcaccgtccggttgtgaaccaggttatcgatcgctttttgcaccgccagctcgctttcaatatccagcgcggcagtcggttcatcgagaatgacgaccggcgcgtttttcaataacgctctggcaatggaaatccgctggcgctcgccgcccgatagctggccgcccatctctcccattggcgtcagccagccttgcggaagacgggaaataaactcaaggcactgcgccgcgcgggcggcctcttctacctcctgccgcgtcgcctgtgggcgcgcgatacggatattcgccagcagcgtgtcatcaaacagccagacatcctggaaaacaacagaaatcaggctattgagctgttccggcgtcaggcggcgaatatcgacgccgccaatagaaatctgcccttgctgcggatcggcatagcgcattaacagtttggtgaccgtagttttgcctgcgccggaggcacccaccagcgcgctcatactggctgccgggaacgtcaaagaaacatgattaagcgcgtggccgtcgccttcttcgtagcgatagctgacgttgtcaaagcggatatcgtaacgttccggcatctcgctttgctctgcgacgggaagcggtgctatcgccataaaccgctcaatccgttgcagggcgctggcgatcagttccacaaccgaggtgtagctgataaacatcgccatcggttctgcgaagcgcataatcatcgcgacggcggcaatcaaaaaggcgaggttcagagtgcccgtcactacccagacgatcccggataacaccaccacctgtaggcccaactccacgacgctggcgatcagcatcgtcgcgccagcgccctgacggtgagtgcgggtctgtaagttttccagcgcattgaaatgcgccagcagcgcccggcttttatcggcatcgctgccgcaggtgcgcaataccatcatcccctgagcaaattcaacgatatcgccgctcagacgctggtgcgcttcccccagcgtctgcatttgtcgccgcatcgccgggcggcgccagtaataaaacggcaccagcagagggaagatcagcaacatcaccagccccagccgccagtctatccacaatgtcgccagcgacgccgtcagcggcgtgacaatggtgagcagcaaaatattggctatcgcaataacataattgaggttttcatccacgttgcccagcagcaaggcgttcatttcacccgccctgccgcgctggagcttctccagcggcacgcggcgtaactgctcgccaagtcgcaggcgcaactcatgggtggcctgcgccagatgaccacggtattcaaagcccaggccataccagcgtagcaccagcgtcacaattgcggcgacgctgaaggccatagcccagttaagaagttgcggcgcgtctccccgtaacagcgcatcaatgatcggataaagacaggcaaaggcgatcccctgcatgaatgccgccagcaacagcgccagcatactgcgtcgcagcatcctggcctgactgccaacgctggagataagctggcgccagatgacgcgccaggccaggttatccgcaggattattgtctttcattttccaccacctcttcctgtgttccacccggcacccaatgctgcgcctgctgatagtgttgccagagccgttgatacaggccgccctgcgccaacagttgcgtatggttccccatttccctgagctgtccgtcggaaaacagcaatatcacatcggcctgagtcaccattgagagacgatgcgcgaccatgatgaccgtccggccacgcatggccgccgcgagcgccttgataagcgccgcttcgttttccgggtcagcaaacgccgtcgcctcatcgagcaccaggatggggcgatcctgcaaaagcgcccgggcgatagtaatgcgctgccgctggccgccggagagaaataccccacgttccccgactcgtgtgttgtaaccttctggcagagcgctaataaaatcatgggcctgcgccactctggccgccgctattaccgcctccagcggcgtatccggcgcgcccagacgaatgttattggctatcgtgtcggcaaaaaggaagttgtcctgaaacacaaacgagagttgcttcatcagggtgtccgtctgcatatcacgcagatccacgccgccaatacggatatggcctttgtccgggtcggcgtaacgcagcagcaagcgcgccacggtgctttttccggcgccgcttggcccgaccagcgccacaatttgcccggcaggcacatgaaagctcacctcctgcaacgcggcgccagtacgcgcttgcggataatgaaagctcacctgctcaaaggtaatgctcgcctcttgcggctgctggtcagactgcggcagcgataactccggcatcgcgagaacctgataaatacgctgaatgcttaaacgcgtttgcgcgaccaggttattgagcatcatcattggcattacggcttcggccattccgctgcccagcagtaaaacggccacccacgcgataaaatcgaaactgccatagtgcaacaggccgtatcccgaccagatcaggacaaacagggtcgggagaggattcagaatcgagaaggaaaaacgcgctgaaaaaccggctttgcgataccaggttttgagcacatcgacccactcttcaagggcgcgttgatagcgcagaaaactggtgctgccgctatcaaacgttctcaccacgggcatggcctgcacgaactcaataaccgccgcgctaacctgctcgcgcgccttatgataacgctgagccatatcttccgaacgctggcgggcgagcacgagaacaaccgatccaaacgccagtacccccagcgtcgcgattgccagccgccagtccagccagaacaagataacgattgtcgccagcggcatgatgatcgcgcgggcatagagcggcgtgctgtcggccacaaaaatatgtaacgacttcacgtcatccagcatcactttcgccactgacccgctgcccatttgctgtaacacgccaggcggaagctgcaatgctttacgggctaacctgctgcgcagaatgttctccagatgaaaagccgcgtaatgagaggtgttgaacgcctgtaagcgcagaacaaaagttaagaccacgcagccgatcacgccgcccagcggccaggccggaatagcgtcaggcgtcgcgcgaatgtcacgcaggctccacgccagaaaaaggagcgcccccaggctggttaatgccgccagccccgccagcgccatagctaaaataaccttcctgcgaaccggtgtaatcacctgccagagaggaaatcgggacagcgattcagtattggatgattgagatgacatgggagtaactgaatttcctgatgaatttttacggacgccaaaaacgacaattcagggtggcgttctgagaattaatgtgaataataaccattatcaataactcatctaccccattcggttctatttatacccgcattggtctaagccacagggagataaccaggtcatgacggagtcaccgcaaacgcaatctgaaatctctattcaccagttggtggtcgggaaacctgcaaacgatggcaatattcctgctcagtgtgaactgctgcgctgttcgttgcaggaaggtatggatattttgctctggaggggccattttgcgcggcctgagacgttgcagctacacgacgatctgggcaggattaacttctcgtgcatcctggaaggcacatcgcgctttgcgattcagggactccggcgccacaccgactgggagcttgcgcgcaatcgccattacattacccatacgccagactgtcgcggcagcgcctcctattgtggccgattcgagagcattaccctctccttcagccctgaaaccctcgcgctgtgggtgccggatattagcgcggtcattaagaataagatcgactcccactgctgttgccagcagcagcgttgtaatgctgaaacccacttaacggctcaggccttgcgtcacgcgctgatgcgcatgcacggcggcttcagtcatgaacaaaagccgtcgacgctatggttgcaggggcaaagtctggtcatgctcagtctggtgctggatgaacatcgcgaagacgccagttgcctctcctgccacttcaacccgatggaacgccagaaactgctgcgggcgaaggatctgctgctggctgatctgacgcaagcgccgggcgtcgcggagctggccagagagtccggtctgagcgttctcaaaattaagcgaggcttccgcgttctgttcaacaacagcgtctatggcctgtttcaggctgaacgaatgcaggaagccagaagacgcctggccaacggcaatacctccgtcatgacggtggcggccgatctgggctatgccaacgccagccatttctctgccgccttccagaaacagtttggcgtaaccccttcgacctttaaacgcgtgatgtaaccggggtcgcgcccccctaaactcctccctgacagaggcccggataccccatccgggcctctgttctttccgcctgttaccaacccgaaacgggcataaataaacccgtttcgggtagcatccaattgttaataattattattctcatatgagcaatgcttttcggtaagacgtgccatcaggaggaagaatgatttctggcgcaccatctcaggattcgctgttaccggacaaccgccacgcggctgattaccaacaattacgcgagcggctcatacaggaactgaatttaacgccgcagcagttacatgaagagagcaacctgatccaggccggcctggattccataagattgatgagatggttacactggtttcgtaaaaatggctaccgccttacccttcgcgagctgtatgccgcccccacgctggcggcatggaaccagttaatgctcagccggtcgcctgagaacgcggaagaagaaacgccgcccgacgaatcatcctggccgaacatgaccgaaagtacccccttcccattgacgccagtacagcacgcctacctgacgggccgcatgccggggcagacgcttggcggcgtgggttgccacctgtatcaggagtttgaaggccattgtctgacggcgtcgcagttggagcaggccatcacgaccttgctgcaacgccacccaatgctgcatatcgcctttcgccccgacgggcagcaggtctggctaccgcaaccttactggaacggcgtcaccgttcatgatttacgccataacgacgctgaaagccgccaggcctatctggacgcactgcgccagcgcctgagccaccgtcttttacgcgtggaaatcggcgaaacgtttgattttcagctgacgctcttgccggacaatcgccaccgcctccatgtcaatattgacctgctgattatggatgcctccagctttacgcttttcttcgatgagcttaacgccctgctggccggagaatcgctgccggctatcgacacccgctatgatttccgctcgtatttgctgcaccagcagaagatcaatcaaacactgagagacgacgcgcgcgcttactggctggcgaaagcatcgacgcttccccccgcgcccgtcttgccgctggcctgcgaacccgccacgctacgtgaagtccgtaatacccgacgccgcatgattgtcccggcaacacgctggcacgcctttagcaaccgggccggcgagtatggcgtgacgccgacaatggcgctggcgacctgtttttctgccgtgctggctcgctggggcggcctgacgcgtctgctgcttaacatcaccttattcgaccgccagccgctgcacccggcggttggcgcgatgcttgccgacttcaccaatattcttctgctggataccgcctgcgatggcgataccgtcagcaacctggcgcgtaaaaaccagctcacgtttacggaggactgggagcatcgccactggtccggcgtcgaattactccgtgaactcaaacgccagcagcgctacccccacggcgccccggtggtatttaccagcaatctggggcgttccctctacagcagccgcgcagaatcgccgttgggcgagccggaatggggcatctcgcaaacgccgcaggtctggatagatcatctggcgttcgagcatcacggcgaggtctggctacaatgggacagcaacgacgcgctgttccctccggcgttagtcgaaacattgttcgacgcctactgccagttgattaaccaactctgcgatgacgaaagcgcctggcaaaagccgttcgcagatatgatgcccgccagccagcgcgcgatacgcgaacgggtcaacgccaccggcgcccccattcccgaaggcttgctgcatgaaggcattttccgtatcgctctgcaacagccgcaggcgctggcggtaacggacatgcgttatcagtggaattatcatgagctgacagactatgcccgccgttgcgcgggcaggttaatcgagtgcggggttcagcccggcgataatgtggctatcacgatgtcgaaaggcgcaggacaacttgttgcggttctggccgtcctgctggccggggcggtttacgttccggtttcgctggatcagcctgccgcacggcgcgagaaaatctacgctgacgccagcgtccggctggtgctcatttgtcagcacgacaccagcgccgggtcagacgatattcccgtccttgcctggcagcaggccattgaggcggagccgatcgccaacccggtagtacgcgcccccacgcaaccggcctacattatctacacctccggctctaccggtacgccgaaaggggtagtcatttctcaccggggagcgcttaacacctgttgcgatatcaatacccgctatcaggttggcccgcatgacagggtgctggccctctccgccctacattttgatttatcggtttacgacatttttggcgtactgcgcgcgggcggcgcgctggtgatggtgatggaaaatcaacggcgcgatcctcacgcatggtgtgagctgatccagcgccatcaggtcacgctctggaacagcgtcccggcgctgttcgatatgctgctgacctggtgtgaaggtttcgccgacgccacgccggaaaacctgcgcgcagtgatgctttccggcgactggatcgggcttgaactccccgcccgttatcgggccttccggccacaaggacaatttatcgcgatgggcggcgccaccgaggcgtctatctggtctaacgcctgcgaaattcacgacgtccccgcccactggcgctccatcccttacggttttccgctaaccaaccaacgctaccgggtggtggatgaacagggccgggactgccctgactgggtgccgggtgaattatggattggcggcattggggtcgcggaaggctatttcaacgatcccctgcgtagcgagcagcaatttttgacgctcccggacgagcgctggtatcgcaccggcgatctcggctgctactggccagatggcacaatcgagttcctcggtcgtcgcgacaagcaggtcaaagtcggaggatatcgcatcgagctgggcgaaatcgaaagcgcgctcagccagctggcgggggtgaaacaagcaaccgttctggcgatcggcgaaaaagaaaaaacgctggcggcatacgttgttcctcagggcgaggctttttgcgttaccgatcatcggaacccggcactgccgcaggcgtggcacacgcttgcgggaacgttgccctgttgcgccatctcgccagagatctccgcagaacaggtagccgatttccttcagcatcgcctgctaaaactgaagccgggtcacaccgctggcgccgatcctctccccctgatgaactcactcgctatccagccgcgctggcaggccgtggtggaactctggttagcatttctggtgacacaacggcgactgaagcccgctgctgaaggttatcaggtctgcgctggtgaagaacacgaggatgagcacccgcacttcagcggacatgatttaacgttatcgcaaattcttcgcggtgcccgtaacgaactgtcgttactgaacgacgcgcagtggtcgccggaaagcctggcctttaaccatccggccagcgccccgtatattcaggaactggcgacaatttgccaacagcttgcacagcgcttacagcgcccggtacgcctgcttgatgtgggaacccgcactggccgcgccgcagaatcgctgttagcacagctcaacgccggacagattgagtatgtcgggcttgagcagagccaggagatgctgctgagcgcccggcagaggctcgccccctggcctggcgcccgtctgtccctctggaatgcagacacgctggcggcgcacgctcactcggcggacattatctggcttaataacgccctgcatcgtctgctgccggaagatcccgggctccttgcgacattacaacagcttgccgttcccggcgcgctgctctacgtgatggagtttcgccagttaacgccgtccgccctgctcagcacgctcctgttaaccaatgggcagccggaggccttgctgcataacagcgccgactgggcggcattatttagcgcggccgccttcaactgtcagcatggcgatgaggtcgcggggttacaacgcttcctcgtacaatgtcctgacaggcaggtgcgccgcgatccccgtcaacttcaggccgccctcgccggacgtctgccggggtggatggtgccgcaacggatcgtcttcctcgacgccttaccgctgacggctaacgggaaaattgactaccaggcgctgaagcgtcgtcatacccctgaagcggaaaacccggccgaagcggatttaccccagggcgacattgaaaaacaggttgccgccctctggcagcaactcttatcaactggcaatgtcaccagagaaaccgacttcttccagcaaggcggcgatagcctgctggcgacccgtctgaccgggcaacttcatcaggcaggttatgaagcgcaattaagcgacctgtttaatcatccccggctggcggattttgccgccacgctgcggaaaaccgacgtcccggtcgaacaaccattcgtccactcccctgaagaacgctaccagccctttgcgcttaccgacgtgcagcaggcttacctggtggggcgtcagccgggctttgccctgggcggcgtcggctcacatttctttgttgaatgtgaaattgccgatctggacctcacccggctggagacggtctggaaccgattaatcgcccgccacgatatgctgcgcgccatcgtgcgtgatggacagcaacaggtgctcgaacagacgcccccctgggtgatacccacacacaccctccatacgcctgaagaggcgttgcgggtgcgcgaaaaactggcgcatcaggtactcaaccccgaagtgtggccggtattcgatctccaggtcggatacgtggacgggatgcctgcccgcctgtggctgtgtctggataacctgttgcttgacggtctgagcatgcagatcctgctggcggagctggagcacggctaccgctacccgcaacagctgcttccgccgctgcccgtcaccttcagggattatctgcaacaaccctcgctacagtcgcccaatccagattctctggcatggtggcaggcgcagcttgatgatattcctccggcgcctgcgttgccgctgcgctgcttgcctcaggaggttgaaacaccgcgcttcgcccgcctgaacggcgcgctggacagcacgcgctggcatcggctgaaaaaacgggcggctgacgcccatctcaccccgtcggccgtactgttgtcggtgtggtcaacggttctctctgcatggagtgcacagcctgagttcacgcttaaccttacgcttttcgacaggcgaccgctgcacccgcaaatcaaccagattctgggcgatttcacctcgctgatgctgctgagctggcatcccggcgaaagctggctgcacagcgcgcagtcactacagcagcggctgagccagaacctcaaccaccgcgatgtgtcagccatccgcgtgatgcgtcaactggcgcaacggcaaaacgtgcctgccgttccgatgcccgtcgtctttaccagcgcgctgggctttgagcaggataacttcctcgcccggcgtaatctgctcaaaccggtctggggcatctcccagacgccgcaggtctggctcgatcaccagatttatgaatccgaaggcgaactgcgctttaactgggattttgtcgccgcgctgtttcctgccgggcaggtggagcgccagtttgaacagtattgcgcattgctaaaccgaatggccgaggatgaaagcggctggcaactgccgctcgccgcgctggtgcctcccgttaaacacgcagggcaatgcgcagagcgctcaccgcgcgtatgccctgagcactctcagccacacattgcggcggacgagagcaccgtcagcctgatttgcgacgccttccgcgaggtggttggcgagtctgtcacgcccgcagaaaacttctttgaggcgggcgcaacgtcgctgaatctggtgcaactgcacgttttgttacaacgtcacgaattttccaccctgacgttgcttgacctcttcacccacccttctcctgctgccctggccgattatctggccggcgtcgccacggtggagaaaacaaaacgacctcgccctgttcgccgtcgtcagcggcggatatagcgcgaagcaaactgattttccccggaacgccatcgcgaacgcatggcgttccattgactttgtgaatcttaggaaacgggaccgattatggataacttgcgcttctcttctgcgccgacagcagattccattgatgcatcgatcgctcaacactacccggactgcgaacctgtcgcggttatcggctacgcctgccattttcctgaatcgccggatggcgaaacgttctggcaaaatctgctggaaggtcgtgaatgcagccgacgctttacgcgcgaagagcttctggccgtcggtctggatgccgccatcattgacgatcctcattatgtcaatatcggtacggtgttagacaacgccgactgcttcgacgccaccctgtttggctattcgcgacaggaagcggagtcgatggacccgcagcagcgcctatttttgcaggcggtctggcatgcgctggaacatgccggttatgcccccggcgccgtcccccataagaccggcgttttcgcctcttcccggatgagtacctaccccggtcgcgaagcattgaacgtgacagaagtcgcgcaggtaaaaggtctgcaatctctgatgggcaatgataaagactatattgccacccgcgccgcgtacaaactcaacctgcacggcccggcgttatcggtacagaccgcctgctccagctcgctggttgcagtgcatctggcctgtgaaagcctgcgcgcaggcgaatccgatatggcggttgccggcggcgtggcgctctctttcccccagcaggcaggctaccgctaccagcccggaatgattttctctcctgatggtcactgtcgtccctttgacgcctcggctgagggcacctgggccggtaacggtctcggctgcgtggtgctgcgtcgcctgagagacgcgctgctgtcaggcgatccgattatctcggtgatcctctccagcgcggtcaacaacgacggcaacagaaaggtcggctataccgccccttccgtcgcagggcaacaggcagtcatcgaagaggcgttaatgctggcggccatcgacgacaggcaggtaggttacattgaaacccacggcaccggcacaccgctgggcgacgcgattgaaattgaagcgttacgcaacgtctatgcgcctcgcccgcaggatcagcgctgtgcgctcggttccgtgaaaagtaacatgggccatctggataccgcggcgggcattgccggactgctgaaaaccgttctggcagtcagtcgcgggcaaattcctcccttactgaattttcacacccccaacccggcgctgaaacttgaagagagcccctttaccataccggtgtcggcacaggcatggcaggacgaaatgcgctatgcgggcgtctcctcctttggtattggcggcaccaactgccatatgatcgtcgcctcgctgcccgacgcgctcaacgcgcgcctccccgatacggatagcggcagaaaaagtaccgcgctgctgctcagcgccgccagcgacagcgcgttgcggcggctggcgacggattatgccggggcgctgagagaggatgcggatgccagctctctggccttcacagccctgcacgcgcgccgtctcgatctccccttccgcctggcggcgccattaaaccgtgaaaccgccgaggcgctcagcgcctgggccggtgagaaatcgggggcgctggtttacagcggccacggcgccagcggcaagcaggtgtggctgtttaccggccagggctcgcactggcgcactatgggtcaaacgatgtaccagcactcaacggcgtttgccgacacgctggatcgctgtttttccgcctgtagcgaaatgctcacgccgtcactgcgcgaagcgatgtttaaccccgattcggcgcagctggacaatatggcctgggcgcagccggcgattgtcgcgtttgaaatcgcgatggcggcgcactggcgtgctgaaggactgaagccagacttcgccattgggcattccgtcggtgaatttgccgctgccgttgtctgcggacactatacgattgaacaggtcatgccactggtttgtcggcgcggcgcgctaatgcagcagtgcgcaagcggcgcgatggtggcggtatttgcagacgaagacacgctgatgccgctggctcgccagtttgagctggatctcgccgccaacaacggtacgcaacatacggtattttccgggccggaagcccgtctcgcggtattttgcgccacgctctcgcagcatgacattaactatcgtcgcctgagcgtaaccggtgcggcgcactccgctttactggagccgatactcgatcggttccaggacgcctgcgcgggactgcacgcggagccggggcaaataccgattatttccacgctcaccgccgacgtcattgatgagtcaacgctcaaccaggcggattactggcgccgacacatgcgccagccggtgcgttttatccagagtattcaggtggcgcatcagctcggcgcccgcgtttttctggagatggggcccgatgcccagttggttgcttgcgggcagcgcgaataccgcgataacgcatactggatagccagcgcccggcgtaacaaagaggcgagcgatgtcctcaatcaggccctgctccagctttacgctgccggcgtcgccctaccgtgggccgacctgctggcgggcgatggacaacgtatcgctgcgccatgttatccgtttgatactgagcgttactggaaagagcgcgtctccccggcctgcgagcctgccgacgcagcgctgtctgccgggctggaggtggcgagtcgcgccgcgacagcgctcgatctccctcgcctggaagcgcttaaacagtgcgccacgcgactgcacgccatctacgtcgatcaactggtacaacgctgtaccggcgatgccattgagaacggcgtggacgccatgaccatcatgcgccgtggacgtctgctgccccgctaccagcagctactccagcgcctgctgaataactgcgtggtcgacggcgattaccgctgcaccgacgggcgatacgtccgcgcccgccccattgaacatcaacagcgggaatcactgctgacggaacttgccggttattgtgaaggttttcaggctattcccgacaccatcgcccgtgccggcgatcggttatatgaaatgatgagcggcgcggaagaaccggtggcgattatcttcccgcaaagcgcctccgacggcgtggaagtgctgtatcaggaattcagctttggccgctatttcaaccaaatcgccgccggggtattacgcggcattgtccagacgcgtcagccccgccagccgttgcgtattcttgaagttggcggcggaaccggcggcaccaccgcgtggctgctgccggaactcaacggcgttccggcactggagtaccatttcaccgatatctcggcgctgttcacccgtcgcgcccagcagaaattcgccgactatgattttgtgaagtatagcgagctggatctcgaaaaagaggcgcagtctcagggtttccaggcacagtcttacgatcttatcgtggcagcgaacgtgattcacgccacccgccatattggccgcacgctcgataatctgcgccccctgctcaagccgggcgggcgcctgctgatgcgcgaaatcacccagccaatgcgtctgtttgacttcgttttcggcccgctggttcttccgctacaggatctcgacgcccgcgaaggtgagttattcctcaccaccgctcagtggcaacaacagtgccgccacgccggattcagcaaagtggcgtggctaccgcaggatggcagcccgaccgccgggatgagcgaacatatcattctcgccacgctgcccggtcaggcggttagcgccgtaacattcaccgcgccatcagaacccgtgttggggcaggcgctgacggataacggtgattatctcgccgactggtctgattgcgcaggtcagcccgaacggtttaacgcccgctggcaggaggcctggcgtctgctttcacagcgtcatggcgacgctctacctgtggaaccgccccccgtcgccgccccggagtggctggggaaggttcgcttaagctggcaaaacgaagccttttcccgcggtcagatgcgcgttgaagcccgtcatcctgctggcgagtggctgccgctatcgcccgccgcgcctcttcctgcgccgcagacgcattatcaatggcgctggacgcccctcaacgtcgccagcattgaccatccgcttacctttagcttcagcgccggtacgcttgcgcgcagcgacgagctggcgcaatacggcatcattcacgatccgcacgcctcttcgcgactgatgattgttgaggagagcgaggatacgctggccttagcggagaaagtgatagcagcgctcaccgccagcgcagccggattgattgtggttactcgccgcgcgtggcgagtcgaggaaaatgaagcactctctgcatcccatcacgcgctatgggccttgcttcgcgtcgcggccaacgaacagccggaacggttgcttgccgccatcgatctcgccgaaaacaccccgtgggaaacgctgcatcaagggttgagcgcagtctcactatcacagcgctggctcgccgcacggggtgacaccctttggctcccttcactggcgcccaatacgggatgcgccgctgaattaccggcaaacgtgtttaccggcgatagccgctggcatctggtgaccggagcgtttggcggattaggccgccttgccgtgaactggctcagagaaaaaggggcgcgacgcatcgccctgctggcgccgcgcgtggatgagtcatggctacgcgacgtggagggcgggcagacgcgcgtctgccgttgtgatgtgggcgatgccgggcaactggccacggttcttgacgatctggcggccaacggcggcattgccggagcgattcatgccgctggcgtattggctgacgcgcccttgcaggagcttgatgaccaccagttggctgccgttttcgcggtaaaagcgcaggcggcaagccagctgttgcaaaccctgcgcaaccacgacggacgctatcttattctctactcttccgctgccgccaccctcggcgcgccgggtcagagcgcccatgcgctggcctgcggctacctggacgggctggcccagcagttttccacccttgatgcgccgaaaacgctctctgtcgcctggggcgcatggggagaaagcggtcgggcggccacgccggaaatgctggcgacgctcgccagccgaggtatgggcgcgttaagcgatgccgaaggctgctggcacctggaacaggcggtgatgcgcggcgccccgtggcgactggcgatgcgcgtttttaccgacaaaatgcccccgttacaacaggctctgtttaacatcagcgccacagaaaaagccgcaacgccggtcattcctcctgctgatgacaacgcctttaacggcagcctgagcgatgaaacagcggtgatggcatggctgaaaaagcggattgcggttcagctaaggctgagcgatccggcgtcactgcatccaaaccaggatctgttgcaactcggcatggactcgctgctcttccttgaactcagtagcgatattcagcactacctgggcgtacgcatcaatgcggaacgggcgtggcaggatctgtctcctcatggactcacgcagcttatctgttctaagccagaggcgacgcctgccgcttcgcagccggaagtgttgcggcacgacgccgacgagcgttatgcgcccttccctttgacgcccattcagcacgcctactggctggggcgaacccacctcattggctatggcggcgtcgcctgtcacgtcctgtttgagtgggataaacgccacgatgagttcaatctcgccatactggagaaagcatggaaccagctcatcgcacgccacgatatgttgcgtatggtggttgatgccgacgggcagcagcgaatcctggcgacaacgccggagtatcacatcccgcgtgacgatctgcgcgcgctttccccggaagaacagcgcatcgcgctggaaaaacggcggcatgaactgagctatcgcgttttgcctgccgaccagtggcctctttttgagctggtggtcagcgaaatcgacgattgccattaccgtctgcatatgaacctcgaccttttgcagtttgatgtgcagagttttaaagtcatgatggacgacctggcgcaggtctggcgcggtgaaacgctggcgccgctcgctattaccttccgtgattatgtgatggctgaacaggcgcgccgacagacatcggcatggcacgatgcctgggattactggcaggaaaaactgccgcaactgcccttagcgccagagctgccggtggttgagacgcccccggaaacgccacacttcaccaccttcaaatcgacgatcggcaagacagaatggcaggccgtgaaacagcgctggcagcagcaaggcgtcacaccgtctgccgcgctgctcacgctgtttgccgccacccttgagcgctggagccgtaccacaacatttacgctgaacctgacgttcttcaatcgccagccgatccatccgcaaatcaaccagttgattggtgattttacctccgtcacgctggttgattttaacttctcagcgccggtgacgttgcaagagcagatgcaacagacccaacagcgcctctggcaaaacatggcgcacagtgaaatgaacggtgttgaggtgatccgtgagctgggccgcctgcgcggatcacaacgtcaaccgctgatgccggtagtgtttaccagtatgctggggatgacgctggaaggcatgactatcgatcaggcgatgagccatctgttcggcgaaccctgctatgtattcacgcaaacgccgcaggtctggctggatcatcaggtcatggagagcgacggcgagttgatgtttagctggtactgcatggacaacgtgctggaacccggcgctgccgaggcgatgtttaatgactattgcgccatcctgcaagccgtcatcgccgcccctgaaagcctgaagactctcgccagcggcatcgccgggcacattccccgccgacgctggccgctgaacgcgcaggcggactacgacctgcgggatattgagcaggcgacgctcgaataccccggcatccggcaggccagagcggaaataaccgaacagggcgcgttgacgctggatatcgtgatggccgacgatccgtcgccatcagcggcgatgcctgatgagcacgaacttacccaactggcgctgccgttgcctgagcaggcgcagcttgatgagctggaggcgacctggcgctggctggaggcgcgtgcgctacaggggatcgcggctacgctaaatcgtcacggcctgtttaccacgccggagatcgcccatcgctttagcgcaatagtacaggcgctgtccgcgcaagcgtctcaccagcgtctgctgcgccagtggctacagtgtctgacggaaagagagtggttaatccgcgaaggtgaaagctggcgctgccgcattccgctcagcgagattcctgagcctcaggaagcgtgcccgcaaagccaatggagccaggcgctggcgcagtatctggaaacctgcatcgcccggcacgacgccctcttctccgggcagtgttctccgctggaattgctgttcaacgagcagcatcgcgttaccgacgcgctgtatcgcgacaaccccgccagcgcctgtctgaatcgctataccgcgcagattgccgccttgtgcagcgcagaacggattctggaggttggcgccggaaccgcagccactaccgcgccggtgctgaaggccacgcggaacacgcggcagtcgtaccacttcacggacgtctccgcgcagttcctcaatgacgccagagcccgtttccatgatgaatcgcaggtgtcttatgccttgttcgacatcaaccagccgctggatttcaccgcccacccggaggcgggttacgacctgatcgttgccgtcaatgtgctccacgacgccagccatgtcgtccagacgttgcgcagattaaaactgttgctgaaagccggcggacgtttgatgatcgttgaagcgacggagcgaaacagcgtattccagctggcgagcgtgggctttattgagggattaagcggataccgcgatttccgccgccgggatgagaaaccgatgctcacccgctccgcatggcaggaggttctcgttcaggccgggtttgcaaacgagctggcgtggcccgcgcaggaatcgtcgccgctgcgccagcatctgctggtggcgcgttcgcctggcgtaaatcgcccggataaaaaagccgtgagccgctatttacagcagcgctttggcaccggtctgcccattttacagatccggcaaagagaagcgttatttacgccgctgcatgccccgtctgatgcgccgactgagccagccaaacccacgccagttgccggggggaatccggcgctggaaaaacaggtggctgaactctggcaatcgctgctgtctcgccccgtggcaaggcatcacgactttttcgaactgggcggcgacagcctgatggcgacaaggatggtcgcgcagctaaaccggagagggattgccagggctaaccttcaggatctgttcagccattcgacgctgagcgacttctgcgcccatctacaggcggctacgtcaggagaggacaacccgatacccctttgccagggcgacggtgaggaaaccctgtttgtcttccacgcttcagacggcgatatcagcgcctggctgccgctcgctagcgcgttgaacaggcgcgttttcggcctgcaagcaaaatcgccgcagcgctttgccacgctcgaccagatgatcgatgagtatgtcgggtgcatccgtcgtcagcagcctcacggcccttatgtgctggcgggttggtcgtatggcgcgtttcttgcggcgggcgccgcacagcgcctgtacgccaaaggcgagcaggttcggatggtgttaatcgatcccgtgtgccgacaggatttctgttgcgaaaaccgggcggccctgctgcgcctgttagccgaaggacaaacgcctctggcactgcccgaacatttcgaccagcagacgcccgacagccagcttgccgactttatcagcctcgctaaaacggccggtatggtgccgcaaaacctgacgctgcaagcggcagaaacgtggctcgacaacatcgcgcatctgctgcgtttactgactgagcatacgccgggcgaaagcgttccggtcccctgtctcatggtgtatgccgccgggagacccgcgcgctggacgccagcagaaaccgagtggcagggctggataaacaacgccgacgacgctgtgattgaagccagccactggcaaatcatgatggaagccccccacgttcaggcttgtgcgcaacacattacgcgctggctttgcgcaacctcaacgcaaccggagaacacgttatgatgccgtccgcctccccaaaacaacgcgtactgattgtgggcgccaaatttggcgaaatgtacctgaatgcctttatgcagcccccggaggggctggaactggtcggcctgctggcgcagggaagcgcccgttcaagagagctggctcatgcgtttggcattccgctgtatacctcgccggaacagataaccaggatgccggatatcgcctgtattgtcgtgcgttcgaccgtcgccggaggaaccggtacgcagcttgccagacactttctgacgcgcggcgtacacgtcattcaggagcatcccctccacccggatgacatcagttccttacaaacgctggcgcaggaacagggctgctgctattgggtaaacacgttttatccgcatacgcgcgcgggacgcacatggcttcgcgatgcgcagcagctgcgtcgctgcctggctaagacgccgccggtagtccacgccaccaccagccgacagttgctctactccactctggatttgttgttgctggctctgggcgttgatgccgccgccgtggagtgcgacgtggttggcagctttagcgattttcactgtctgagactcttctggccggagggagaagcctgcctgctgcttcagcgctatctcgatcctgacgatccagatatgcatagccttatcatgcaccgcctgctgctgggctggccggaaggtcatctttcgctggaggcgagctacggccccgtcatctggtcatccagcctgtttgtcgcagaccatcaggagaacgcccacagcctctaccgcagaccggagatcctgcgcgatctgccgggtctgacgcgcagcgcggcgcccctgagctggcgcgactgctgcgaaaccgtcgggccggagggcgtcagctggttgctacaccagttgcgcagccatctggcgggcgaacatccaccagcggcctgccaaagcgtacatcagatcgcgttatcacgtttatggcagcagattttacgtaagaccggcaatgcggagatcagacgcctgacgccgccgcaccacgaccggttagccggtttctacaacgatgatgataaggaggcgctgtgacgcaatctgcaatgtgcatcccgctgtggcccgcccgaaacggtaatactgcgcatctagtcatgtgccctttcgctggcggcagcagtagcgcgtttcgccactggcaagctgagcaactggctgattgcgcgctttctctggtgacctggccggggcgcgatcgccttcgccatctggaaccgctcagaagcattacacaactggcggcactgctggcgaacgagctggaagcatccgtatcgcctgacacgccgcttttactcgccgggcacagcatgggggcacaggtggcgtttgaaacctgccgacttctggagcaacgggggcttgcgccacaaggactgattatttccgggtgccatgccccgcatctgcattctgaacgccagctcagccatcgcgatgatgccgactttatcgctgagctgatagacattggcggatgttctcctgaactgcgggaaaaccaggaattaatgtcgctgtttcttcctcttctgcgcgctgatttttacgccaccgagagctatcactacgactcgcccgacgtctgtccgccgctgcgcacgcctgcgctgttattgtgcggcagccacgatcgcgaagcctcctggcagcaggtcgatgcctggcgtcagtggctgagccccgttacaggcccggtggtgattgacggcgatcatttctatcccattcaacaagcccggtccttttttacgcagattgtccgccattttccccacgcattttctgcaatgaccgcgttgcaaaaacagcccagtacttcagaaaggtgacgcatgaattcttcctttgaatctctgattgaacagtatcccttacccattgccgaacagttgcgccactgggcggcccgttatgcctcgcgaattgccgtcgttgatgcaaaggggtcgttaacctacagcgcgcttgatgcacaagttgacgaacttgccgcaggtctgtcatcactgggtttgcgttcgggggagcatgtaattgtgcagcttcccaacgacaacgcgtttgttaccctgctgttcgccttgttaagactgggcgttatccccgtgctggcgatgccctcgcaacgggcgctggatatcgacgcgctgattgagctggcgcaacccgtcgcttacgttattcacggggaaaaccacgcagagctggcccgacagatggcgcacaaacacgcctgcttgcgtcatgttctggtcgctggagagaccgtgagcgacgattttacgccgctcttctcccttcacggtgagcgacaggcatggccgcagcctgatgtttccgccaccgcgttgttgttgctctcaggcggcacaaccggcacgcccaaactcatcccgcgccgacatgccgactatagctataacttcagcgcttctgctgaactgtgcggcatcagccaacagagcgtgtatctcgccgtcctcccggtggcgcataactttccgctggcctgccccggtattctgggaacgcttgcctgcggcggaaaagtggtgctgaccgacagcgccagctgtgatgaggtgatgcctttaatcgcgcaggaaagagtgactcacgtcgccctggttccggcgctggcgcaattatgggtgcaggccagggagtgggaagacagcgacctttcgtcgctgcgcgtcattcaggcaggcggcgcccggctcgacccgacgcttgctgagcaggttatcgccacctttgactgtaccctgcaacaggttttcggtatggcggaaggcctgctctgttttacccggctggacgatccgcatgccaccattctccacagccaggggcgcccgttgtcccctctggatgaaatccgcatcgttgatcaagacgagaacgacgtcgcgccgggcgaaaccgggcaattgttaacgcgcggcccttataccatttcgggctattaccgcgcccctgcccacaacgcgcaggcctttaccgcgcaagggttttaccgcacaggcgacaatgtcaggctggatgaggtggggaacctgcacgttgagggacgcataaaagagcagatcaaccgcgccggagaaaaaatagccgcggctgaagtggaatcggcactgctgcgtttagcggaagtgcaagattgcgcggtggtcgccgcgccggacacgctgcttggcgagcggatttgcgcgtttatcatcgcgcagcaggtgccaactgactatcagcagttgcgtcaacaactgacccgtatggggctcagcgcgtggaaaattcctgaccaaatcgagtttctggaccactggccgctcaccgccgtcggcaagatagacaaaaaacgcctgacggctctcgccgtcgaccgttatcgccattctgcccaataagcgcaaaccgacccgaaacaggttgaaataaacccgtttcgggtagcaccactattagaaatagttatcattttcaattcaccattgtcggtatttttggcgtttcgccgtcttacagggactcacaacaatgaaaatgacacggctttatcctctggccttggggggattattgctccccgccattgctaatgcccaaacttcacagcaagacgaaagcacgctggtggttaccgccagtaaacaatcttcccgctcggcatcagccaacaacgtctcgtctactgttgtcagcgcgccggaattaagcgacgccggcgtcaccgccagcgacaaactccccagagtcttgcccgggctcaatattgaaaatagcggcaacatgcttttttcgacgatctcgctacgcggcgtctcttcagcgcaggacttctataaccccgccgtcaccctgtatgtcgatggcgtccctcagctttccaccaacaccatccaggcgcttaccgatgtgcaaagcgtggagttgctgcgaggcccacagggaacgttatatggcaaaagcgctcagggcgggatcatcaacatcgtcacccagcagccggacagcacgccgcgcggctatattgaaggcggcgtcagtagccgcgacagttatcgaagtaagttcaacctgagcggccccattcaggatggcctgctgtacggcagcgtcaccctgttacgccaggttgatgacggcgacatgattaaccccgcgacgggaagcgatgacttaggcggcacccgcgccagcatagggaatgtgaaactgcgtctggcgccggacgatcagccctgggaaatgggctttgccgcctcacgcgaatgtacccgcgccacccaggacgcctatgtgggatggaatgatattaagggccgtaagctgtcgatcagcgatggttcaccagacccgtacatgcggcgctgcactgacagccagaccctgagtgggaaatacaccaccgatgactgggttttcaacctgatcagcgcctggcagcagcagcattattcgcgcaccttcccttccggttcgttaatcgtcaatatgcctcagcgctggaatcaggatgtgcaggagctgcgcgccgcaaccctgggcgatgcgcgtaccgttgatatggtgtttgggctgtaccggcagaacacccgcgagaagttaaattcagcctacgacatgccgacaatgccttatttaagcagtaccggctataccaccgctgaaacgctggccgcatacagtgacctgacctggcatttaaccgatcgttttgatatcggcggcggcgtgcgcttctcgcatgataaatccagtacacaatatcacggcagcatgctcggcaacccgtttggcgaccagggtaagagcaatgacgatcaggtgctcgggcagctatccgcaggctatatgctgaccgatgactggagagtgtatacccgtgtagcccagggatataaaccttccgggtacaacatcgtgcctactgcgggtcttgatgccaaaccgttcgtcgccgagaaatccatcaactatgaacttggcacccgctacgaaaccgctgacgtcacgctgcaagccgcgacgttttatacccacaccaaagacatgcagctttactctggcccggtcgggatgcagacattaagcaatgcgggtaaagccgacgccaccggcgttgagcttgaagcgaagtggcggtttgcgccaggctggtcatgggatatcaatggcaacgtgatccgttccgaattcaccaatgacagtgagttgtatcacggtaaccgggtgccgttcgtaccacgttatggcgcgggaagcagcgtgaacggcgtgattgatacgcgctatggcgcactgatgccccgactggcggttaatctggtcgggccgcattatttcgatggcgacaaccagttgcggcaaggcacctatgccaccctggacagcagcctgggctggcaggcgactgaacggatgaacatttccgtctatgtcgataacctgttcgaccgtcgttaccgtacctatggctacatgaacggcagcagcgccgtcgcgcaggtcaatatgggtcgcaccgtcggtatcaatacgcgaattgatttcttctgattattgtaaaagggataccgaaaaggtatcccttttacaccactagttaaaaccagtaactcagcagagtcgcaaaaaatattaatccatagtgattatttaaacaatgaaattgcgattaggacaaatagatttaactttctcgttcctttctctccttatactaaagaaataatcatatcaaaataaaaattcacaacagtgcaacattaaaaatacaaccaacaaacaatcctatatacaaggcacatctccagaatataaaagcacagacaaacaacctaaaaaaaacaacccgaattaataaacctttacaattacacaccctcaactcaaaacaatttcgaaaactcaaagatttcatcggcaaaaacagtcattaacacatctatttttttgaaattctgtagagtaaaactgatataaagcatttatcatattaacatatcaataagtgcaaacttaaaaatcaaaagttagggttcagtaaaaccaattcgccacaaaaaaaaccaccccatacatataaattattttataggtaaaatagattatatattctcatagctaccacaaactatactagcctgaactatatttattctgctgcaatcaatgcatacataacacaaatatcactcaggtacactactcaaaccacgctgggatttttcctcaagttataatcatcaccccgaaaatcattcggcatttactcattaaatagtcaccccataggcctgtacatgttcactcagaaatatacatccttttctctgtcataaaccctctgattaatcataaataaatacttgtgacaccaatctttttccttaatggaacgaattgttgtgtagaaggagataatattatgtcgaaaaaatatcagccattgcttataactcattatatgtcaacatgggtcactataacggaagcagttgagatcactaccaaaaccataaaacaaaaaattactcctagcgatatttatcgtcatgccttgagtggcaacatcctactatcggtctatttccagtctcctgtgatacttaagaagatacaaacttttaatggaaaaataaaattcaggcagtttgagggagacctacttgataaactatgcatgcttgacagggacggttttatttatggtcaaaatttaagactctgtacagaagccagatatgtttgtcctgtgcaacaaattatagatacccccctgataggctatgaatatgttttgattcagcgcatactggcacgtgaacttaaatttccctccccaattgtgggggcaagaaaaactaaccatggtattatagtaagattttcagaggagctttttcaaattttcgaaacgatgagttggaaagaacgcgtagaaaaacaaatttccagactacctaaaaacacagcattagatgtcataaaaaaactaacagaagtgacgaccataaaatataatcacaatgggtgttttcctctttatacattaccgcctgatgcctgttttgttattcgccacaccgaagtcgaaagactaattaatttatacaaaaaaagggagagtcatcccatttcaccttcccgtatgacaacaccgttatcacgcctgttttggctggcctgcaagcacaatgatactatcagcccactgctgaatcatccctataagctcctttctatttttgaacaatgggcatcagacgatggcatcggggaaaaactggacgctgaaacactgaaaaatgcgctgaagcgtggttcgccatcttcgacatccttatccggctaataccatccccatttgtaatggccgacaaccctaaataagggttttgcatcccttatttagggctcaccagctttctctcaggcttccactgtgtttttttattctccggccaccgtttatttcagtcacaggaggatatatgacatcttatcagttactacgcctcagacaggttgagcaaaaaacagggctgaagcgttcacagatatacctttatatgaaagagggtgcatttccccgttcaataaaaataggccctgctagtgttgcctggctcgagtctgagattgacgagtggatcaacaaaaagttatctgaccgataaagacgcaatgaggagaagatgatgaacattaatatccctgcactcataaacttcgatcctgcaggtataaaaaaaagcacctgcatgtatatttcagacctgcccggtattgtgctatatgaaactataccattcactgaatattcagctgaattactgagcacttattcagttaaggagtcaatttcatgcttccatccctgaatcatattatattaaccgttgctcttcaggcgctacgggaaggaaatattcatcactgcgaaactatgggattcacttacgatgaaatgaatttgctcggttgcttatcaataaacgatcttatcaccctcagtcaggcacctttaccgcttgtcgatattactatccgccatgatgtcctgcaaaaattactggcatcatcccacgaggaaaacaggcgtcaggaacaactgaacagagctgtcaggctggggggctcaatcgcactgatgaaccgttatttcggggttggctccagagaaacctgtgcacgccgccggttactcggtgtctccgttccaaacgggagaacacccattccggatgaagaaaccgatgctgcaatctggcatcagtggcaaaaatatcgggtcgaaaacattgattccccggaggcgctggacgccatgatgcaggttacagaaaacctttcatcgtgtactgccccctcgctgaccgttgtctggaactgcatcacgcattgcgaaagaaagaacacggtaaggagaatacaacgtgccagatgaaatcgatcgcgatcaggcgtttaatgaacggtgcctagaagcactgattgaacaaagccggttaagacccacaccgacaccttccctgcagcactgtcgattttgcggcaaggctattccggaaaaacgccgtcagacgctgccgggtgtaacaacctgtactgactgtcagtcgatactggagaaacgcagacgttaaatctgtatgtgcggaggagaatagctccgcacattttaatatgcaccagccggcttgttttcaggttcccgtgcctccatgtcatggatgaataacctgctcacatctcctgctgtggcaatccttttttacagtcagtacaccagaggtcagacatgaacaaaccggcaaacaagatggaattcgtcagaaaactgcggtaaataaatgacggcagcctgctggaaaaggttgtcgggcatatggaagaaaagctcacagggaatgagcttgaaatgctttatgccgcagcagattatcgccgcgcagagattgtaataaaccagtactttgataaggttcccggtaatgtctggaaatatgtcagataactctgtgttttttatgcaacaggtacagacggataccactgcggcatgaaaacgaatttcaccacccggcccggtaagtatcggcctaagtggccgggaaacgtttaaccagattaaagaccgtcccttacaacaaaagggactactgtattcctgtctttcacgccttacacattattgtcgttaccaaattcagccacagagacagcatacaaccccatctgacatataaagaaagtcttcctccggatgtttaatttaacctgataataatcaacaaatattattatcagcccgcccgtcatcattcatgcacacacacaccgtgccagtaatacgttaatttcaaatacttttttatcattccttccggtatttattttcccgttaaaatttcattccccctcctgcatcctgaccatgctctttaacaatatggagcgggctgtcacacaaccataattcagggtgccgctgaatgttctcgctgacccgttaaaaccggaatgcaggatcggaatgtgatcgaagagatcatcttcaacaattttaattaaacgaggacactatgagaaagcctgtttattacgcgtatgttgcccaggaaagtcatccggactctcagggtgagaaaaatacctggtggacaaaggtcggagtcgcctttccccaccacggtaaatccggtctgaatattgtcctgacgcccggtattgccgtttccggcaaactggtcctgcttgagccccgggaggaaaataatccaccacagaatacgggccccatcgaaaccgtgtcgtaaccacccttaattctgttcccacagcatgcagtatcagcagaccctgcatgtcacttgtttactgaggtcaccatgctttccaccacagcctttctggcgatagccatgcagtgcgccgccagcattcatccgtccacggcattcgacgtggcacgggtggaatccggttttaacccttatgccatcgctgagattgtcccgaaggccggcccctctttcggcgatcaacacattatttctcacctgccagccagccggggagatgcagagcatattctccgccgcctgacagcacaggatcgccgttactctgtcgggctgatgcaaatcaccagcaccaatttccgccattatggtgtgtccgccacagagctacttgatccctgtaccaatctgtccgtcttcgaacacattctcagagactgctaccggcgcggcggcacgctgaaaagggcgctgagttgttattattccggcaatttcagtaccgggcaacaacctgaaacggcgttttccggaacgagctatatccagcgaatcggttatccgccgggatcatcccgctatgcggtccccggaacccgtgaggacaaatcatcagttgccgttcccctgaaaaccgcccctgccagtgactcatcccgtcaccacgagatctggcccggagtcgtcgtccgtggcgtccctgcgaaactccgccaagaaaaaatcttcatcgcaccgttctccgcgccgtcagtgcgccggagtttctccctgtcaccccgtgaggaggaggaataatgatacttttccgcaagctaaaagctgtggtcccccccgtttcggcctgtacgctgacgactttttctgcaaccccggcactggccgacggatttcagcgggcaaatactgtcatgcaaaaagtgtcaaccgggctgcatggtctggcggcaatcacgatcaccgtggccgtgatctggattggctataagaccctgtggaaaggcgagagcctgtcgcagtgcggctacatcatcattggcggcattttaattggcggaggcagtgaaatcggcgctctgctgatgagctaagaggctgaacatatggcaaagctgctcaaggcaatgaaacgcccggcggcgctgtggggggtgcctatggtgcccctgctggctgtcacgggtgtaaccatcatcgttgctgtctggacttccgtcgcactcctgttcttacttcccgtcgaatttctggtgatgaaatccctcaccagaaatgaaccaatgcggttcaatctgattgccgtttggctgagagtgaagggaaaaccggtagcaaaccgtttatttggcgcaacaacacttatgcccgttgagcatgaggctgttgatatcaaggagtttctcgacgccatgaaactaaatcagtgtgccaccatcaagaagtatattccgtactcatcgcacattcatcagcatgtggttcgctcacctaaaagcgatctgtactgcacctgggaattgatgggaacgccgttcgactgcgagtctgacgaatcactccagttcgggacgaaccagttacacgggctaatccactcattcgaaggtatgcccgtcactttctatatccataacgaccgcaatacgtttaccgacaatcttcataaagattccggcaacccgtatgccgatgaagttagccgtctttactacgcttctgtcggggtgttccggcgtaaccgcctgttcctgacagtctgctatcgcccgtttgtcagccttgaaaaagcagaacgcaaacggatgaaagacagccagaaactaaaggaactggacggtgctttgctggaaatgctggaaataaaaagcacgctcgataccgcgctgtcgcgctatggtgcgcggcctctcggtacgtttaccgaaggaagcgcggtgttttcgtcgcaactggctttctatgaatatctgttaacgcaccagtggcgaaaggtgcgcgtcacccgcaccccggcctatgacgtgatgggagcggcggcgttgttcttttcggctgaatccgggcagataaaccacgccaacggtacgcaatatttccgggggctggaggttaaagagttctccgaagaaaccgccacggggatgatggactcccttctttatgccccctgcgattacgtgatcacgcagtcctatacctgcatgtcacgcgaggaagcgaagaaagccattaagcgtacccgtcgccttttgatgagtgccgatgacgatgctgtttcccagcggctggatctggatgtggcgcttgacctgctgacatcggggaaaatcgcttacggaaagcaccatttttccatcatggtgtattccccgtcgctggaaaacctagtggctgatactaacgaaatcagtaatgcgctgaacaacatcgggataacgcctgttccggcagaaatatcgctttcagcggcgtatatggcagctattagacaccttatggaataaagcaaaggtgttaggtaaaacattacacgacatggatgattccacttatataaaagatgagggaatgactgctcaattttatgtctggcttgggatattcgtcttaatgattatcaccgcgtttgtttccatgatagcggaagtcatgatcttattactgagtattacagcacctatatttattttttgccttatgtatggttttctccgcaccatgttcaataactggctacaaaatatatttgcagccatattaaccattatgctttcagctctttctttaagaattgtagtgaattatttaaacctagtccttaccaaggcaacgaaggtcgcggacagttcaacaattgttgaattaggagcacaagtctgtcttgcgggtatctgtgcggcaatattggtttatctctccgcaaaactggccgcagcactggccggggcgagtgctaccgtatccatgcaggggctggccgctgtaggtatcggtgctgctgcttttggtgccgggaagctagccggaggtgcaattaaagaaaccaaacgttccacccaggacaacattcagggctggaaggatgcgaatgcaggtaagcccggcaagcctggaggtgagttaggctataacgcttctaaagcgcgtaaatacgcgattgagcagatgatagcccggaacgaagcgcggaggctggcacagtcgagagaatccgcagttaagaagttcaatagctaagacgtctccagtccatcccccaaagtgccaacttatgaaaatataattatattttcatatttttaattcaattgaggaaatatttgatgaaacgcttgattgcgctggctttgctatgcgcgctttctggctgcgcccagaacacgcttccatctgcatttagcggtaagggagaacccgtaaacacatctcaaattatggcggagttaaacagtcatgaatgaacagaaattaattgctgaatcccgcacctttgagcagcaaatgattgaccgggataaacgcgccacgaaagccggttttgttgttggcggtgtgggtctgctgattgcggtactggcgctcgtcgccgtggtcgtgatgttgccactaaaacagacagacgttgatctgtataccgtggataaccacacaggacgggtggaacatgttacccggacatcgaaaaccagcctgaccgcaacagaagcctatcaaaaggcgatggccgcaaactacgtcaaagtacgtgagcggtatgtctatccctctttgcaggacgactacgagacggtacaggtctacaacgctccccaggtaaacgatgactatctggcgctttacgccggaaaaaacgccccggacaaggtttataagaacggtgcgcacaccgtgaaagtggagatcctgtccaaccagatcaccgatggaacagcccccgataaagtcgccactgttcgctacaagaagattatccgccgtctggctgataacagcacccgcaacgagtattgggatgcccggttcacattccattcagaccctgacaaggacatgagcgatgcggaacgcgagatcaactacttcggctttaccgtcaccagttggcagaccgaccgcgaaatccggggaggtgaatgatgaaaaagttaacgtttaccgcactggcactgatgatgtgcggcgcggcatggggtgcggccataccacaggcaagccgctatgactcccgtgttcagcaggttatctataaccctcagaacgtcaccgtcgttaacaccaaacccggctttatgacaacgctggtatttgataacgatgaggcggtcataagcgccaaacccggctttgatgaggcgtgggaagccacgccggatgcaaaccgggtaaacgttcgcccggttgcgctcacgcagggagcgcccggagaagatggcaacacaacgcaggtcgtgatccccccgaacagccgggactggcataccaatatgctggttgtcaccagtaagcgcctgtacaacgtcgagctgaacgtcatcgatgataaatcggcacagcaacccgcttttcaggtgagctatcgctatccgggcgaagaacgggacaaagcgagccgggaggcgacggccagacagcgcgagtgggagcagaaacagcaacaggccagcgtccagaaagcgctgaactcggcgcagacgccccgcaactggagttacaccaaatatccgggcaaaggcagtttcaacatagttcccgactttgcttatgacgatggccgctttacgttcgtgggcttctccccgtctaagtccattccttctgtcaccaaagagctgaacggcaaagagcatgcggttaacagcagtatccagaagaaaggcgacttcaccgtactggtgattcaggaggtgacgccacgcctggtactgcgttccggtaatgccgttgtaggtctggaaaatagcggatttggcaaggtacacgccgccgatggttccaccgtatcccggcaggtggaaagagtggaaaaaccggaatccaattaatctataaaaatagttttatatttttataaaaggaaacatgcagatgaacgacgaaaacaaagtgcctgtgccggatgaagcgcaggcatccccggcacacgctgaggatgatattgccacgcttgagcgggaagcccgcgtaaaaagggaggcagagcttctcaacgcgcaggacgacgaagagaaagacccggtacaacccgccgttaacaagctgaaaaagcgcaaacggggcaaagcaaccgcctttcttgccattgtcgcggtcgcgcttatcttcctggcatggggtggtaactgggtttatcgcaatatcctgtggcagcctacggaagaaaagaaacaggacacagccccgcagacgaacaaaaccgattaccggcagcgtaacgatctcggtatgtccatcgatacagccgaagaagagccagagcaacaggataacggccagagcagcgcggggggaacagggcaggcggctgccccgccagaactcaacaaagccagcttccttattcgccgtgatggttcggccaccacacagaaccaggtaaaaacccggcagcaggaaatgacgctgacatcggcaacaaccaccggacaacaggacagcagcgcggccacacctcccggccagccgcaaaataccaccgcaccgtcgcagggacaaagccccgcaccagtacggcgcataccctataaccctgacctgtacatcccggaaaatacctcgatcccctgctcactggatcgccgctttgtatctgaccgggcggggaaacttcgctgtacggtcactactgacatctggagcgccagcggcaacacgaagctgatagagaaaggcactaccgcatcattactttaccgcgccatagcggaagaaggtatgaggcacgggcaagggcgggcattcatcattgcgacgaagctacgcacccgccagccaccttatctcgatatcccgttggttgataccagcgcggctggcgagctgggcgaggctggcgttgatgggtggatagattcgcacttctgggagcgattcggcggcgcattaatggttggcatgatccccgatattgccgcatgggcatccaacagcgcaggtaaaaaagaccgcaatacggactatacggaaaacagtcgccaggctatggcagatatggctcgtaccactctggaaaacagcatcaatattcccccaacgctccataagaatcagggcgagatcatcaatctgatcacaggcgaggatattgatttttccaacatctatacactaaggttgaaaaatgaccgctaagaatatttccctcgaccgctataaacaacgtttctttggcgactttctggagcttcccggcctgacggaaatcgccgtcaaccgtccaggtgaactgtacacaaaaatcaacggcgtgtgggagcaacatgccgttcctttgaactatgaggattgctacaactttgcccggtgcctggcaaaacaccacggcgacaatatcgaagatattaagccggggctgtcagccacgctggaatccggcgaacggtgccaggtgattgttcctccggcctgtgagcgcgatacggtgtctatcaccatccgtaagccatcaaaggtacaaatcccgcatcagtcatatatcgatgcggggttttataaccgggtaacaggcgaggaaaaaacggagacgcacgacgaggaattaattgcattgtacaatacaaaaaacattcctttgtttatggagaaatgcgtcgagtacggtaaaactctcgcggtcgccggggaaaccagtacagggaaaactacctatatgaaaatgttgataggttatattccggtacatcttcggatatcaacaattgaggacaacccggaaatcacgttctttatccataaaaactacgtccatcttttttatccgtcagaatcatcagatgaaaaaggttctatcgttaccccggcgagccttttacgctggaattaccgtatgaaccctgaccgcattttattaacagaggttcgcggtgcggaagcctgggacttccttaaaataacaggttccggccatgaagggagtatgacctccattcatgcaggatcagcgaaagaagctatagatgggtttattacccgttgctatgaaaatccacagtgcgcccagctcccctatacatttatgttacgtaaggttctggatagcctggacgtgattgtgagcattgatttagacggaaatgtccgccgtatgaatgacatttatttccgtccaattcatcgaaaccagtattttgaggaaatgaaagcatgataaaacaaattaaagtaatcatgttggcagcaatagttaccggatgttcatcgccaccgcctcccgttcctgtagattgggataaagccgccgccccattaaataccagtttaccgcaatggagcgacaataacgttatggtcccttccccgacagttaacagtaaatggacatcatcaatcagcgcacaaagtttctacaatacaatacaatatggactccagccgtattttacgcagtcgcccactcaacacgaattgtcgtcactgcacaatccggcactgatttctttaatgccaaaaactggcttcggcagaatggagcaaaaggtgttattgaataccagcctgtctttaattgtctgacgtgcagagaaaccactatttatttctctcgctaatcaatttaagcaacacaacctaataaggactcaccatgaataaaaccgttatcgcggcggctgtattatgtatggccgcaggaaccccaatttattcctttgccgctgacccgtgcgaagttgttctttgcatgtacggaaaagcaacgggtaatagtggtggaagtgaatgccgctcagcagaaaaggctttctttaatatagtcaaaaagaataaacatggtttcttacctaaccatacgttgaatgcgagaaaagcatttcttggtgaatgtcccagcgcagacccggaggcagtaaataaaatactatctaagttcggcaaggtcagaggatagtaataatccgcataacaccccctgtttactgtaaaaggtgcaacatgcaaaaagaagacttatttatccgaaatatacattctcgtaatcaggacaggatatcggtagccctgatatatgacacgttatctaaagaagcccacagtggttgtgggctgtattatgagatatacgaaagcaggcttatcggtcttttgcgcgatcatcttttagaacttaatgaagctgacgcaaataaattacgacgctatgccgaaagcaaaggcacgaaaattgatgatgcgtcctacagtgaagcactggaagctgaaagggagtgcagggctgaaatataccgcgaacagatgtaatcacacagaacaaaaatgtattgtgcaacacacaggctgacaggcggcgggtttttaaggcttcattatttttggcttcaatttcgaagaaattgttaagacgaaaaataatgaagtggaacgtggacagaaaattcaatttcggagaaattgctaattttcaggatccacgtccacccgcgaacattcgccccagcgaattgaagcgggccggggggagccgcaaaaattttgccgccccagcgagcaataaggcacgcccacgtgccggtttttgtggggggcttgccccgcacaccgtcgcagccaggctatatttcccgccccggcggggaatatgccgattaggcgcgaccaacccctttaaagcagcgttcccattttttcgagcttgcgaagaaaaaataggctaaacgcgcgtcttaaaggggttggtcgcgcgtagcgtgcgacggtgtgccgccgttgaccccgggggttttgacgcgacgttcagccgcgacattacccccatgcgacaggcaataagggcgtccagcccgcatgtactggcgcacgccgtgtcgtgcaggaaagcatgctttcctgcacatggccgcacagcggccaccttctttaccccatacgctcgccccgccttttcgcccgacaccgtggggcgaattgatggggcgatgttatggggtgaatagctgacgagggaggtatcatgattttaaataagcttgccgcttcactgtcgccgatagtgaacgggatgctggcgctgctcgcttttgtgcaacagcaacaactggtgctggcgttattagcggggctgacgatgccgttttttgcgtcgatgaaaagcgatgaacggcagaaagccccgttatggaaaaagctgattatcgctttttccctgctgtgttttctctccggcacactggctccggtcgttatcggaccctttcagtggttgtataagatcagacccagcagtgataatacggtactggcttggtcagtacggattgcattcactgtaaccggggttatttttcatattatgcttcgccggatattcacgccggaactggacaaaataaagaaacgccttgttaaaaaaaccacccttgaacgggaattgcgcaccgatgtccgcaccgtaaagtccctgctgcccgaaacactgcattatgatccgctggattatatcgacctgattaaaggcatttttactggcatggacagggagaacgaaccaatgtatctcccgttaaaagactggcagaaacagcacgcggatattattggcaccaccggagccggtaaaggggtagctgccgggatattgctatatcaaagtattattgccggtgaaggcgtttttgttatggaccccaaagacgatgaatgggcaccacacctttaccgcaaagcctgcgaggatgcaggaaaaccctttgccttaattgacctgcgaaaacagcaataccagctaaacctgattgaagatattacgccagatgaactggaagaattgttcgttgccggtttcagcctggcagaaaaagggcaggaatcggacttctatcgtattgatgaccgaaaagccgcccgtatggccgcgcaatttgtcagtgataacccatcggcaactctccgtgatatttataacggtgattacgttcagggtattgccgaaaaaatcaaagcgttctttgggaagattgaggaactggcattactcaatgccattaactcaccagaaggcttttcgcttaagcacatatttgatgagggcggctgctgttatgtagtcggctccatgcgaaacagcaaaattattaccgcccagcgcatgctgctggttcgcctttaccagttagcagaaaggcgcgaccgtgtaacagacgtaccccgccccattgctgtttatctttccgaactgaaataccatttatccaggccagcgctggaaggtttaggcgcggcgcgggataaaggcgtacacattattatggaccaccagtccatcgccgatttaaaagactgcccggcagatttgaaaggtgacgccgttgtcggtgcggtcgttgaaaatgccaaattcaaactggtttaccgggttatggatccggatacggcaggctgggtggcaagaatgtcaggcacgattctggtggatgacgaactccgcaaggctaagacggataatatgctgacagaaaccatcgacagtgagcgcacaatccgccaggccgaacgtttctttattgacagcaatatgatcctgaacctgcccgattttgtcagctttatctttacgacaaaaacgctaccttctgcctccttgatttcaccgataaaggtcagaaagcgtcagctaaaaatcttctcggtttcccctgatattgccgcagcggcagccccggtgaagatcatgctggattttggcgaggatgataaaccagccatgccggatgtgatgacaacccatccggctcttttcttcgacgaaagcgaagtaaaaccggcaaagtcccaatctgatgatgaagaacacttctccccactggatttttaaggagtggttatgctgatttcgtcatatcacgagcgccagacgcgcaacagcgagaaaataagacaactgctgaacttcctgaaagaagaaacctacagtgattttaaaacgctgatgcagttatttagcttccgagatcataagtcgctttattcgctgcttgcaaaaatggagcgaatggggttaatccagaagcatatgcttgaatcacggacaatcaagatttcattatgggggatcaccagcgacgggctggcggcggtcttaaccccgaatgataaaatctttcctgcgcggtttgaaccatcaaaaatcaccggctggacactggagcaccatcttgataatcaggccgccaggcttattctggagaagaaaggtgcttcgggatggattaacggcgaccgtgccagctttctcagccagtatcaggtaaaacatcgcccggacgggttactgaccctgcctgacggtaacgttattgccattgaaaccgagcgccgcctgaaaacccgagcccgctaccagtcgattatcgccagccacctgctggcccgaacaaacaagtactggatttacattttttatgttgtgcccgatccacagaagaagcgtgcgcttgaactgctgtttgacagtatcaggcatgtcatcatcaaccatcagcacatcccgctggaagaacgccaccgtagggtgtttcgcatttatacctttgatgaactgaaacacctgtcattaggcagctatacgtaagcttttactcaggccatcgtgatggcctcaccggcctggcggcgataccgccaggccggaaattttttattccactgcgagccgcagactgttcggtactcgctgtgctgcgttccgcctcagtctgcgccttgcagcgttgccggttaaaagccatgtaaccgcattcccttgcggtgtctgattccggtctcagagtttatccatcaggtaacgatgtgctttagaggctgcgctggccgctttgaaaatataacgcttgtcgttttttagcgctttcagccaggaagcaatatagcttccatgttgtacctctccctcaatcccaagatccgccatcagaaaggcacttcccagctctgctaccagttcttcctctgcataatccgcactgccaaacttccctttcatttcacggttcagacgttttttgccaccactccagtgaaccagctcatgcagacctgtagcgtagaaattagccgcatccgaaaacagatggcgctccggtagccagacttcatctgttgatgggctgaaaaaggcgttttgtcctttctcgatgatgtttgcgccactcttccgcaacaggttctcagcctgcggcaacgggtcaaaggttgcttccgggctgacagtttcagttgtcagggacaggccgtcgatttgctgaacgttaaacacggtgaaggttttcagcatcgggatatgttcaacttctccggcgtcgttttccttctccagcgtggtgtaaaaaatagctgttgtaccatgttcccccttgcgaacctgtccacctgctacctgtgcctgtttgtaggtcatccagcgtgaatcgctgaaaccctgcttagatgcgctgcaccacagtaacatgatgttcataccgctgtaggctacgccggtggcgtaattcgatggcagaccagatatgccggatacgcgttgccacgggcaggaccacggttttacaccgccttcaagtgctgcaatgatgttgttggtaacggtctgataaatgtcggctctggttttagaaaatttcgtttttgaggagcctgacgggtccagcggggatacgctggtcgccgctgtgatgttaggggcgctagtctgggtatgcagggaaatcgtcatggttttttctccgtcagtgtgtgattttcgtcttcgtatcgcctgacggttcgctttcccggcatcgttccgtccagcaagggcgcagcatgcgtgccatttacccttgctggacgggttgtgttgggaaacgattaaccggaagctgatatgaagaacgaaaagtacacaggaggaaaactatgcccctgcatagccggacttagcgccccttagttcgcagcggtgaaatggtttgggggttaacactgcagcggtgatacttgcaaataatcatccgagtggtatctctgagcccagtcatgctggcaaggtgatgagggtgcagattaaaaaaggattgggaatagtcgacatgcgtacattggctcactttacttcggaggtgagtccacggtgtccttcgctgaatgggggttattttgatcgcagggagcttcggcccccattttgctgtgatctatgttgaattctccgtggcagcatgttccctacgctttggaataccgactgtatgcgctgcttacttttattgtatttgattatactcaatttatgtacgattgacgtacatcctcaaaacccttaccgttgagtaatagcctgtcctttttgtggcataatatgaccgcagctgcccgtcacccaaatgaagttctcacacaatggcatgaggctggtggtgtgttaacgattgagctagcgcgccaacttggtgtcccagccaatggaacacccagatcatcatcggcaaacgcagtattaccagcgactaagcactacggcttgctcattggttcagcgattactcgcagttctggatgcacttgtaggcactgtacgatttggagtttgtcgaaactgaatcaggaatggctatcagatcgctccctactggcctaactgtttactattgtaagattaacaagcatacgaagcctgaattgggaagatttatgacggaagggcttacattgatgagtgtatttggagggaagtagcgcatgaatgatgcaccttcagacatcatatttcactatccaccggagctgttcaatctcctggtggatgttgtgccgttgctcaatcgctctaagcaggatgtgctggttttcttccggggcgcaggagtacctgacaacataacttctgacattgcagttcacttgagggctgcaccaaaggatgtcaacaagtaccagatggttcgcacggtacttgaacgcctcaacgcgaagggggaacacgctctccgtgaacggcgcgaggtgctgcggcgcgtggtggactttgcgaactttgattcgtgctggcccgcagaccaacttaaggccaaaggtcttgtcgccagtatccgcgaagtcgtcaaccaaaaagacgctttcacgcgcatgaacaatgcccgcgaagaagaacggcaaacccgcctcgctgagtcacagcggatcgcagcagaaaaacgtgatcgtagttatagaatcgagaatgccaagcagggtttatataaattatttggcactactgcgactgcacaggaaagaggaaaattgctggagacggctctcaacaatctttttcaagcctacggtgttctcattcgtaaatcctttcatttggttggtgaggctggtgaagggatcgtcgagcagattgatgggatcattgaactcagtggtgttctgtatttcgttgaaatgaaatggtatcgcaatccggtgggtaagcctgagatttcagagcatcttgttcgcctcatgtcgcgtgccgaggttcgaggtatcttcatttctgccagtgactatacagaaccagccattcttacggcacgtgaatttctgcaacacaaagttgtagtcctatccacgcttcatgagatcgtccgtctgcttgagcagcaagacgacctttcagagttcttcacaaagaaagtccaggctgcgcagatacacaaaaacccgtatttctgcccacacgatagccaagcacaaggtgcgttatgactgcgagttggatggacatcaataagccgccgagcccagcaaccgctgttacggcagctcaggtggcgaacggccccatttttccaccgcagcaaagactactgacctactcaccagacgagtgggagggattcgtcgaggaatgggcttattactgcctcacgacgaagtatgaacacgtcctgcgtttctctggtgctggtgatatgggtattgatgtcgccgggttcgttggtgatgaacgcctgctgggggtttgggacaatttccaatgcaagcactacggtaatgccatcaggcctagtgatgtttgggttgagttcgggaagatcatctggtactcgtacaaaggtgaatatacggtccctcgtcgctactactttgtttcgccacgaggtgctggtacgtcgcttagccgcctattttcgaatgacacgaagttgcgtgaggaattgttagctaactgggataagcatgtgaaaaatgcaatcactagcacacaagaagtgttactcgacgcgaagcttcgtgcctatgtagactcattcgattttaccatcttcgacgccaagactgcgcttcagcttgttgacgatcacagagccacaccggttcacacagcgcgctttggtggtggactaccaacgcggcctgcatctgaaaagccgccccaagaagttgccgccaccgagagccgctatgtgacgcagttgttcggcgcatacagcgaacacacaggaacaatagtgactgacccttcggccttgcccttgccgaaactcaaggatcatttccgtcgccagcgcgaggcgttctatgaggctgagtcactgcgcgtcttcgcacgtgatagtgtcccgccaggcacgttcgaagctttgctggatgacattcatgatggcgttattgatacacatgacgggaaccatgctgacggctacgaaaaggtctgcgctgtcaccaaggctgcccgcgacatgcaaattacggcaaacgccctcatcatttgtactaaccccaaggatagagacggaatctgccaccaacttgtgaacgaagagcgccttcggtggacacgatcatgagccaagaacataagccaattaccttcaatagcccacttgaggcgggtatacgtgcggtctcgattctgggtgctgcctatccgcaaacctacgacctccagcggcttgtggcctttgactaccttcttgttcacacgggcgatattggtggaccagacaatttgcacccaccgacgccaatgcgctctgctgaattgctcgtgcgccgcaagttagttgagcaatcactgcttctgatgatgacccgtgacctagttgagcgcgaagtcacatccgagggaatcaagtacggcgcgggtgaaaatgctgcaacgttcctgtcatcagtatcttccaactatttgctgtccctgaaggatcgcgctgtatggcttgtcgaaactattggtgatctgacggatgaacagttcaaagccatgatgcgccgtttcttcgataaatgggtcgaacagtttcagagcattgagcaaagcttaggaggtgatgcatgacgacagtaactcccggcttacgcttgcgctttctcggtttttttgggccacaaaagccacccgctacagtgaccttcggtactggcctcaatgtcatttacggcgcatcaaacactggaaaatctttcattgtcgaagccatcgacttcatgctcggtggaaagccgcctctgcgtgatatccctgagcgcgttggctacgaccttgttctattggggcttgaaacccttgatgggaagtcatttacactctggcgcagcatagatggcggtggttttcggctctacgaagacttgcaccagacgccaccaacaaacgaaattccgtatacgcagcttgacgaaaaacacagcgataagaacaatacgaacctttcatcattcttgctggatctatgtagccttggtggaaagcgtgttcgcaaaaattcccggaacgaaaccctcagtttaagctttcgcaacattgcgcgtttgatgatcgtcgatgagacggagatcacacaacaaagctcaccgcttattgatggcaatcccaccgccaacacgccgaacttggccacattcaagttacttttaaccggagcagacgactccgcattggtcgccaccagtaataagagtgagccggaagagttatcgcgcaaggcacaattgcgtcttctcgatcagcttcttgaagactatggtgaccggctcaaggagttgacaaagagtcctaaggaactcaaggagcagctagagaagattaacacctcacttcgtcaacaggcggcccaggtaaacaccaccgaagatgagtttcaggaggctgccgggaagcgacgagaattacgcaaaaaactggaagaaagccgagagcgacgtgcagaggtaagtgcgatgcttgagcgattcaggctgcttgatagacactacttgtccgatattgaaaggctacgtgccattgaagaaggcgggacgctctttagcgtactgagtgccgggcattgtcctctttgcggagcggcccccgatcatcatccccccgatactgggtgtaatggagatactgatgccgtcgttcaggctgcacgtgtggagattgccaagatcgaagttttgcgcacggaacttgtagctaccgtccaaagccttgagcgcgaaggcgccaactttgatcgcagaatacccactgttgttcgagaattagagtcgatttcggagtcagttgaagaattcctcgctcccaagctctcggcccttcgcaagtcctattcagactttgccgacaagcgggccgaggtacgcgaagcgctggcactctatgccactgttcaagacatggagcgccgtcgggctgatcttgagaagggcactgaggacgagaaggctggggtggttactaacgcagatctctcaagcactgtggcccatagttttgctaagactgttgaaggcatactgactggttggcacttcccagaggttggggatgtgtacttcgattccaagtctcgagatcttgtaattgctggaaagtcgcgtagtgcttttggtaagggccttcgcgccattacgcatgcagctttcaccctcgggctgcttgctttctgccgtgagcgccacacaccacacacgggattcgttgtactcgattctccattgctggcatacagagagccagatggaacagaatatgatttgaccggtactgaccttaaagatcagttttacgcgtaccttgaagcgctgcctgaggacacccaagtcatcgttgttgagaacaccgacccgcctgatgcaatcatgaagcgtgagcagtctcttatgtttggcaagaatccgcatcatggccgttacggtttgttcccttttatagccgaccctgcacaataaatgtgtatacaaatgggaagtcaccaatgacttggtgacgatccagcgttttttatcgaatagtatatgtacctccccttcgcgggtctggttgctccagatttgctattcgcttatccctgacaggcttagccagttttccgtatcctgacacctccggcccgacgtcagattgcccacggggtggctttaaaaaaactgggcgatgttgtgattcgccgcgcccagtttcaatctccgtagctgtcctcgctcaggcaaccacgttaatcccgcgagttgtctaaaatcggggcaaaattggctgcaccggatgaacccaacatccaggactttcactgtcaaaaaaatcaacacgaacaggccctagatcgtcctgaataacctgatacgcatggttgcaatagacctgattccagcgataaacggaaaccgctacacgttggatgccggttccgcgcatccgcttcagaatatgacggtcatgttctccaagcccccaaccaagtatcgttaaggagggtcgctgcgacgtaagtacctcccggtacacggtggacagatagtagctattctggatagaagatactttctgctgcatcgttccttcgctaacaaacagcggcaccgcttgctcgctgcgccactcttcaagaattgcctcaagcaagccttctccagcgttgtggatcttgaactcctgctccacaacatttctgcacagggccaagcttccatgcgggtagaaaaccaaggtgttagtacgctctctaaaagtatcacgaaatctccaccaagcatcgtcgaagatgccgttccacaagaaacaatccttgaataaatgaccatcttggatgtcgaatccataggtcatcgtccagtagatcaacaagtcgtaattcaacgataaaacggtatcgaaccctttgaggaactggtacatattaggcaatttatcgctaacttgctcatattcagggtgtatatcacgaacggcctgaatcaaacaatttctgacattcaggtaggcttgatgtgtgcgattgtctggtatttgaagtgatctgtttacgttggatgcctgccaaactagccgaagaatcatctcgaaatcggatgttctgaaaaattggaagagtcgattcatatcatgtgtaagcagacctgccctgtgggcgtaagccagtagagaaccgtagtcaaggaccggtgaaacagcaatgcttgcaccattacccaacaatatcgtattccgatgatagttaggtgcaatttgagcccaaggcataatagcgtgtggcatatcttattctctctttttccttggcagtttattatgaaatagcactgataagccattttccacaatttcttaaggataaatctttttggtcgagtttaaggcctttctgtacatgtcggcgcggtacgccaccgacgtaatggacttgcctcatatccgaatgcatcataccgccacataatgtttttggttctgtcccggcgtcgtaatacgcttctgttatcctttgcgcatccagtccacgccaattttcggattcagatcgatatcggcttcatccagataaaataccggctggtccgtccgcctctgggctacagcctattagatggggagccacttttcctcataatgcagatgttggattttaagtgttggcgaagctctgggccagatcattctgcccgtctcaagcatctatgtaatgtagcgggatgcagtgacacgttaaagagtcggttatcgacctctatgtccacaacgtgaagggctggcaataaaaccaatatttttatgagagctggtgctgtatgcgctgatatactcgattacattgaggtcttctacaacctggaacggcaccacagccatctaagccatttcatcccgaaggacttcgaacaggtccagttatgagggcaggaaatatctactatcgtggggtcaatccacgatttaccagaagctgatatggaaaatggaaagcatacaggagaaaaaatctgcctctgtatagctggacatggagccccttgctccgctgtggtgaaataggttgtggtaggatctagaggcgttagttcatatctaagatgttagcctgcttttaacgacaaacaggagtaatatcatagagcgattggttattagaaacatacaccgccatcattaaaagttatttttggattaacatcgtaattcgaccataataatacctcaatgatacggagcccccaaaaatttactatagtaaattcaaaatggtcttatagttttgttcatcctttatagataataataaaaaactcttcactttgaagttttgctttttttagtaattatgtagaacaaacacaaagatactatcggtgttatatatacaatcaaatatatattaaaaatttggttgaaatcattagcgataacatggtacaataagaaaattaattattatattcatggccattaacaataaggtctatgggcggtagcgtacttatataaaaattagttgttatatctattaccaacgtaaaatctctccctctcttgctaataagacttatttataacagagggggttctattcacctattaactgaattattttttcaaaaatcaattaagttaatacttatacacatatgcatgataataccgcaggtatattacttatgggaataaaaagtatacggattaaaaacatactctcctttgatgacgtatatattgatagctttgaagattttaatttgattattggtagaaataactctggaaaatcaaatcttttaaaagtatttaaatacttttatgaaaaattagacgagcaacggagcattcctcttactctaaattcgaattacacgccctctggaataataacaattacatatgatacaacccggataaagaaaatagtaaccagcactaataataactctcgatttcataaacatatatacaacactctttttaaagaaccaaataaaaataaattcaccgcacttttcgcacccgaaagaaaaaaacaaaatagcgaatattccttaacacttacaatatcaaatgatgactcaatatcatggtctacgaaagataaaaaacttttatccctaattaaaattatcttcccttttttttatatagacacacgtagaatggatttatacaactgggaagacatatggagaataataagtagcattaactccttcaactttcagaaaataagcgaagatgaaatcctgaaatttttagatgaaaatatttcatctagagatggcgactacaaaaaatacatcactcgcattactgatgtaattgacacaaaaccatacacctataaagagaaagtaattaattatattaagatagcattgaaaggtcatattttcacgaactcaggtgaagatatccttcatcagtctgatggaacaaattcacataaatatattgaaacaattattaagttgctcatttcgttatcacgaaccgagttcataacacctaccatatatatagacgaacccgagataggactacatccaaaacttggcgagcaatttattacaacaattcacacaacttataatagatataaaaaaagcgttcccgaaaaggaatcaggaaaatactcaacaccttatccttgtttaattttcagcacccatgcaccaaatattttaaagcaaactattaaacttttttcaacagatcagcagattttgcatttttctaaaaagaataaacactccacaaagatatctaaattaaactcacaatatagtgatttgcgttttataaatatgtttagcgataatgaagctagactttttttcagtgagtatattcttttcgtagaaggttccactgaaatggaagtcttccaaaatagttctttagctagaatttatcctgatttaggcaggattgacatatacgccagtgatgatgttatgttgagaaatataaacccaacttattctcaagcagcaattccttttttaattgttaaagatatagacaaggtgattaagcttgactataaaaatgaaatattaagtctggatggtgatgtttctctagttaataaactaatacgaaaaggcagtttaaagttttataatccatccttaataaaaaaaattgacagcgcaaaggaaataataagagcggataagtctaagaaggaaatgtcggttgatggcttgtttttcaaaacatttaaaattgaaaattttgtgagggatttcaataaactgttaaaatcatttaaccttaattatatgacaactacaatagagggtgcattaataaatgagcattctttaaaatacttttacagatggatttgtcatatcgtttttaaccagctagacgtcaataatgaaaaccctaaaaaaatgtttgctggcttaatgagaacgtacaatcttaaagatggagctataagtatattaaattcggcttttgttctctcaactcatttaagtatattagatccagtggagcaaaagctggtattcaaggttaaaaaaagggctctttttttaattaaaaaaagcattaaaggagattttaaaaacaataaagaaattacaaccctatttagacttctttttggaggaaaaactgccacacttataagtttagaaatgaatctgaaaaaaagctgtcaaagaatagacccatctattacagccacaataaagaaatataaaagcaatgagcttaaattcttactcccctataccacaaaaactagtggctgggttaccagttttttggattttacgatagctaagttagagcaagaaaatgctgataagatagccgagaatttacgcttccttttccctgaaattatatctataatagagcaagcttcttcttcgatagatataggggagtttcactgaacgattgtcgttcctagcccctgcaaacactagtttgccgccgccaattgtcgcgatggccgctttaagcctcacggggtgtaaagatggtcttggtatcggagaagaagctttatgaaagaaaaaataagcaagattgataaaaatttctatactgacatttttattaaaacatcatttcaaaatgaattcgaggcagggggagttataccaccaattgccaagaatcaagtatcaacaatcagtaacaaaaataaaacattctattctctagctcactcatccccacactactctattcaaaccagaattgaaaaattcttacttaaaaatatacctttaagtgcatcgagttttgcattcagaaaagagcgctcatacttgcattatttagagcctcatacccaaaatgtcaaatattgtcatcttgacattgtttcattctttcatagcatagacgtaaatattgtacgtgatactttttcggtatacttttccgatgagtttttggtaaaagagaaacaatccttattagatgcattcatggctagtgtgactctgactgcggagttagacggggtcgaaaaaacattcattccgatgggatttaaatcttccccatcaatatctaatattatttttagaaaaattgacattttaatacaaaaattttgtgataagaataaaattacttatacacgatatgcagatgatcttttgttctcaacaaaaaaagaaaacaatatattaagcagcactttttttataaatgagatttcatccattctctccattaataaattcaagttaaataaatcgaagtatttatataaagaagggactatttctttaggtggatacgtcattgaaaatattttaaaagataacagcagtggaaatattagattgtcgtcttcaaaattaaaccccttatataaagcactatatgaaatcaagaaaggtagctcttcaaagcatatatgcattaaagtatttaacctaaaactcaaaagatttatatataaaaaaaataaagaaaaatttgaagccaagttctactcatcgcaactgaaaaataaactcttgggatatcgttcttatctgctttccttcgtaatattccataaaaaatacaaatgcattaatcctatttttttagagaaatgcgtatttcttataagtgaaattgaatctataatgaacaggaagttttaaaaaacagcaagaacttattaacactacctatgtcataattaaaaatctcataccataaacaatcagccacaatgatcattgtggccatgatgttagtaatattcgactaattttttatatcaatttagctccgtgaattcacagagcaatacatccacgtgatccacagtacagcgtttaatggtggtcattctggtggtcttgacggactagcaattcaggtttagcttacttattagccagttactggcaatggcgatcccagtcagaggagccaaatttaagaagcctgctttcgagcaggctttttgcttttttgcgtcgctgacgttaactcagcatcgcatccagcctggcaagcacctcgttgacaacgacgccaggtatgcgttccagacgcttgcctttccctaccgccttcctacgccccgcgtgtcctccgtgagcgcaccccagctcagcctgaaaaagcgcctgccagtaggatgaattcactaccgtttgcgggtgagatagcgtggattatccactctgtctaacgttatacccggaggcaccatgaacctcagacaacagcaacagcaggcgttcgatcgcagcggagaacctcttatcgtcggcaacgtcagccactgcccgctgccgcccgagaccctcgccgcactgggccccgattccccctatgtggtgcaggtatacggctcaggcctgaccggcgaggtttatcgtctgcgcatcgccggcaaggagtacaatttaaagaaacgtcgcgccgtcgccggcgttgccaacctcaacggccagctgtcgtttttaaatgaggtacagcgtcggcaggcattgcaacagctgaaggatgacccggtcaccgcgccgcgcttcacccacatcgtcccaacgctgtatgccgattatcgcctcggcatcctgctctccccctggatcgatggcgagccgatacaccagttgaccccgccgctgatcgcccagctatttactactctggaagcctgcgaagaacaggggctgatggagtgggatctctgtagcgggaatctgctggtggaccggcaggagcagctatggctgttcgattttggctatatgtatcccttcgacccgctgagagaattcaacagcaatggtctggccgacccgctgttccactttgtcgaacgttttgagactcgcttcttttttagctggctgatgacccggatccctgacgccgaacagcagctggcgcaatatcgcgagatgaagcggctggcggtcgaaagctaccgccggaagctcgtctggcttcgcgcccggcgcgctgacccgctggtgctggctcactttcagcagttgacggcgcgctgggagtcggcgctggcggaccctgccgcgctgagccggctgtttgccgtagaggcctttcgctcacatgtgctggatattgaagacgacctgcatggtcagtcctgtaccttactcaccctgcaacgcattgattgggtgataaaccagctggaacagcattatcgctttatcgccgacgaaggcggcctgttttacgacaatgttgggaaatctcagcaggcgctgctcagcagctatgcgcagaagcggcagcaggcgcagcagtacctgttgaaggccaccgccgcaaaggattaacggcgctcgcgtccctgcttctgcttcgcctggtacatcaggcggtcagcggtggccaccagcgcgttgagactgggatggctggcgggatcatattcgacgcagccccaggagaacgccagctgccagggattggccgcctgctggttgaaacgcgccacgttgtggctgagcgtctccatcgccgtcgcggcatcgtggcggctggtattggcgaacagaatgataaattcgtccccaccctgcctcgcgaggatatcggactcgcggaaggccgctttcatcaagtcggcgatggcgatcagcgcgcgatcgccctcttcatgcccccaggtatcattgatgtgcttgaagcgatcgaggtcgacaaacgccaggctcaccggctcatggcggcgctgggccgtcagcagggcatactctgccagggtgaggaacccccggcgattaaacagtcccgtcagctcatccgaggttgccgcatccagcaccttgaactcatcctccacgatcgccgccagatcgcttaagatctgcatttcatgggcggaaaacgatcgcggctggtgatccatcagacagaacgacccgacggtcgcgccatccggcagttgcaccggatacccggcgtaaaagcggataaacggcgcctcaataaccagcgggttatcgtgaaagcgctcgtcctgctgcatgtcgttgacgataagcgggtcggtttgcagaatggtatgggcgcaaaatgaaatatctctcggcaccgtgtccacatcgagaccggcacaggacttgatatgcaggagatcttcccccaccagactgatggacgccaccggcaggttatacagcgaacgggcaagcctggtcaggcgatcgaagcgttcttcttttccgctattcaacagcccggaagagcgtagcgattgcaggcgacgctgctcgtcgggatgaagtccggctaatttcattgtctctcacttgtctcttgcacagaattccgccgggtttccgcagagaaacccggcgttttatcctgcgaggggaaaatagtcgtcaggtaccccatgagttaagcagatttcctctgcacgtcaaccggcgcgccccaggcgactggcgcccagggcgctggcggaatgccattaacggcactctgcccggcaaatagggcagatcaggcgcggataaacgccagcagatcggcgttgatagtatcggcgtgggaggtatgcatcccgtgcgggaagccaggataaattttcagctggctgttcggcagcagcttgtcctgcaggatggccgcatttttatagggcaccacctggtcgtcatctccctgcatcaccagcaccggcaaagtgatcgacttaaggtcttccgtctggtcggtctctgaaaacgccttaatgccttcataatgggctttagcgctgccgatcatcccctgtcgccaccagttctggatcgtcccctgggatatctctgctccatcacgattgaagccatagaacgggccagaggcgacgtcgagatagaactgggcgcggttcgccgccagcgctttgcggaaaccgtcaaacacctcgatcggcgtcccgcccggattctgctcggttttcaccattagcggcgggacggcgctaattaacaccgccttcgccacccgcccctgcggctggccgtagcgggcgacgtagcgggcgacctggccgccgccagtggagtgcccgacgtggaccgcattgtgcagatccagatgttccaccaccgccgaaacgtccgccgcgtaatggtccatatcgtgcccctcgctaacctgatcggagcgaccatgaccccgacgatcgatagcgatgacccggaacccttcggcaaggaaaaataacatctggttatcccagtcgtcagcgcttaacggccagccgtgatgaaaaacaatcggctgagcttcctttggaccccagtctttaaagtaaatattgacgccgtcttgggtggtgacaaatgccatattacagactcctcttttcaggataaccagcctgcaggcccgtgcctgggctgaacgccgacggcggccggcaggagtgccgaccgcacaggaatgtgatgcctgtaacagtgtagaagatatttaacgccgggcgggacaacttaccctgtctcgcttgattcgccgatccaggaccagaccgcgtctggtatcaggccgcactctcctgctggcggatccgcaccatcagcgcgccgagcagcgcccagtcaagcagcacggcgaaggcaaagcagacgccatggcgtcctcctcccgcagtatgccaggtcagcagcgtcgccgcgatggcgatagctacgctcagtaccgtggcgccgctgacccgcatccccggcagcgccgtcctacccgccgcaatgcgccaggcgacagccgctcccgccccaccgcacgccacgcccggcagcagtgccggccagtcctgcccgccataccaggccaccagcgccagcagccagccggccgctgacagcagaaaggcccagcgcgtcgccgccaggggtgagcgataaagccaggattgtccgcgtgtaaatccccacccgacgccaaaggccgcaatcagcgccgtcagcagactcagcgtgccggtcaccccgataaccgggggcatgattaacagcaaggccccggcggcgatgaccacgctaagggcgatagcgcggccgcgggggtcgatcgttgccgcggcttccgcggcggtgtagcggcttacaacgtgcatagttgactcctgacaggcgaagctgcatgaatttaattcatgtcattgtctttacatgcccgtagcctatcgccacaatatcgctttacacaaacgcatagttttcagccatagatgagaaaaactcagccatgagaccgccccgtctgccgccgctgggggcgctacgcgcttttcatgccgtcgcccgccaccgcagttttaaacaggccgccgaggcgctcggcgtcagcgcgacggcggtcagccatcagattaaactgctggagtcggtgctggagtgccgggtctgcgaacgcagcgcgcagggcgtcagtctgaccgctgatggcgagatcctttacgccgccacccaacgcgcctttagcgccctggaacaggccgtcgtccagatcgctcatgcccgtcagccgccatccttaaccgtcaccaccacctccaattttctcacccactggctggtgccgcggctggcggatttcaccgcccgctttccggctatcgacctgcggctacacaccagcgtcgaacgagtggatctgcatctgggcacggtagacgccgcgattcgctatcgtgaaacgtcggagcgggacctgtactgcacgctgctgtatgaggatcgctttatcgtggtcgccagcccgactctgggcctcagccggcctgaagatctgcagcgggtgacgctgtttcacgttgccaaccggcgcgtgccagctgattcgccgagctgggagaactggcgtcggcgctatggaccgccgacgctgaatattgatgcggggttaacctttagcgatgagacccatgccctgcaggcggcggtggccggtcagggagtggtgatcgccagcgaactgctggcgcgggatctgctgcagcgcggcgtattgtccgcgccgttcagcaacgcattgcctggcgcccgctactacctggtcactaccgaagcggtagcgcagcgggcggatattatcgctctgcgggagtggctgctcagtcagatggcgtcgggcgacggcggccatccgactgcgggatagcgggcttaccagccgcagacgttggtctcttcatcggactcgtagccgcgaacgatattgatcagatccttcaccgcatcagccgcggtgagtgggtcgcgcagcgccgccagcgaggaaaaggttttatcaaccgagacgccgttattgttattggtgaccgtcaacagaaactccccctcttccctgtcgtccggtaacttgctcagcaggtcattaacggcctccaccgcctgctgtggaatatacaacaccattggtttgagaaatattttttcctgcttctggtgaagtcggccattctctagcgctaaggtataacctttattttcactggtcatctcttgttatccctcgataagaatttttggatcaacataaaagtcgacattaaaaaccgtgtcctctgagagggcctcaatacagtgccacttctccggcggaaagacgccaaactggccggcttcaatagtcagggtttcaacgggctcggggctggtttcatcggcatagccgagatagcggatcgccccctgcatcactgagagacgagggtagacgccctgccgggtgccggcatccagatggcggcgccagatagaggccggggcggtctctttggtccacagcggcgtgctgcgggtgtgaacgtaatgggtgggaataatgattcgctgcataattgtgcctcactttaccgtctcaaacgcgacgttcagaaatagcctatatgatgcatatcatataccccttttaaacgttaaggatattattttgttgtggaattttacgcctactcctttttatacctcgcagggattagcgctaagagaaaataaaaaaggcgatttcaggatcctgaaatcgcccgggagaataaaagtagacacgttaaaaatttgttagcgcagcggactcggtttgccgattaaatatccctgaaccaggtcacagcccagcgcctgcagcgaagccaactgctcttcggtctctacaccttccgccacaatgcgcatatgcaggctctttcccatgctgataatcaggcggacgatatccagatcgtctttttgttccggaatattgatgacaaacgagcggtcgattttaattttatcgaacgggaagtagcttaaacgggacagggaagaatagccggtaccaaagtcatcgatggagatctgaatgccctgctcgcgcagctggctgagaatttccagcgaacgggtgttctcattgaatacgtccgactcggtgatctccagatcaagacgtcgcggatcgaggccggtctgatgcagcacctcgataatggtgtcggtcagcgatgtattcatcaactgaattggtgaaacgttgaccgagaccttcagcggcgtcgcccagctggccgcttcggcacaggcggttttcagcacccattcgccaagggcattaataagaccgattttctctgccaccggaataaacaccgtcggcggcacggcgccgcgcaccggatggaaccagcgaaccagcgcttcatagccgtagatttcgcgcgtgacggtatcggcgatcggctgatagtagactttgaactcgtcatgggccagggcctgcagcagatcgtcttcaaacgatttgttctcctgcaggcgctgcagcatccccggccggaagatttgcacatggccgctaccctcttttttcgcctcatacagcgcgaggtcggcgcacttgtacagataatcggtacgactttcaccgtcagagatcacgatcccaatgcaggcgtcgatattaatctgcgcatcgtagatctgatagggctggctgatcttctcccggataacattggcccgctcaagggccatctcctcagtgagatcgtaggagagcatcgcaaactcatcaccgccaaggcgatacagcgtctcggaggttttgcggaaaaaagagaggcgactggccagatcctgcagcagcttatcgccagcatcatggccaagggtatcgttcacatccttaaagctgtcgaggtcgaaaagcatcaccacggcgcatcccttatacggacgcacctggttgacgatctcctgcagccgctgccagaaagagagacggttgggcataccggtcagcgaatcatggtaggcatcgtactgcagccggcggttctgcacctgcagcttctctttcgaggcctgcagatcgttggccagcgttttcatacgaacatgggcgcgacgcagattattattctgtcggagcatcagcagaccgagagttatacacatggcgatcagcagaatggagatcaccgagtagatataatagagatgctggattttatcatgggtgatattaacgatattgatatcttgcgtcagggtggcggcggccattgaggtcagcggaccatccagctcgcttaacaccggcaggatctgtctgacctgctccggcgtcatggtatcaacttgtttatcgagcagatgaagattacgaatcagcgtcgcaaccaccgtcttccgctgctcgcttttattgataaatttacccagatcgccctcctgcagaagctcgatctggctcatcatgatctcaagacgcaggcgcacctcatcgtggtccgccccttcggccccaatcgccattcccgccagacgagactccagccgcatatattccgacaccatctgcgacattgaccacgagtccgtatagcgggtaaatttttgcaactcactttgtcgctcatgcaccagataagtaatatatccggtgacaacaaataacgacaaaataatagccgtgagtattcgattcaagatccaacccttattctataatcatctttgaaacttgccaggccgatcgggaataatagatctggttctgtaattcagcactgctgtcgtaagggtagacaataaataacgggcctttatcacgaatgcgcatatattgaccgttcatttttaacgccataatgaccgggaatttataaaaatcatcaatcgggataatggtggtgtagtcgttcagcgccagcacgcgggccgatgtgcctttcgcgccgactaaatccatgagtttactaaggggaataccgtcaaaacgaaccttgccggtgtaccagggggtggtggtttctatcgtcttcatccccagtttttccagcattgcgagatcaaaaacggccttgtcgccgacattcatatttccgatttttccggaaatggtcagtacaggttttcctgtcggcgcaggcagtttttcagcataagcagaaggcaacatgacagaacaaaataaaactgcaagaagtagacgcattttactcaccattccagagagggagacacgttaagtgtaaaccatttacgtcgattcttaaaaggtgtccatctttgttatccgttgatttaattaaaagtataagctggatggcaaattgccagaatgttaagtccagggtgtgatttcgaccgtctttcccatcgattcttttttgcgccatctcccccgcttagcaggcaaactactttcctccacggccgctgcgcggtagtctcagagcagacgcaacggtaaaagcgtctcattccaataacaatgaagtacgtgactgacaggacagggtatggattcaacaataagcgtgcagcccggcgaggcgccagattcactacatcgggcccggcgggcggcctggggtagttttgccggcgcggtggtcgactggtacgattttcttctctatggcattaccgccgcgctggtgttcaaccgcgaatttttcccgcaaatcggcccggcgatgggaacgcttgccgcctttgccaccttcggcgttgggtttctttttcgcccgctcggcggaattatttttggccacttcggcgatcgcctcgggcggaaacggatgctgatgatgaccgtctggatgatgggtatcgccactgcctgcatcggcctgctcccctcgttcaaccagatcggctggtgggcgccggtgctgctggtgttcctgcgagcggttcagggattcgccgtcggcggcgaatggggcggcgcggcgctgctctcggtggagaatgccccacaggggaaaaaagccttttacagcagcggggtgcaggtgggctacggcgtcggcctcctgctctctaccgggctggtatcgctgattagcagcctgaccagcgaccagcagttcctcagctggggctggcgcttaccgttcctgttcagcgtggtgctggtccttattgcgctgtggatccgtaacggcatggcggaatcgcaggagtttgaagcgcagcagagccaggacaacgcgccgcagaagaaaaagcggctaccggtagtggaagcgctgcttcgccatccgggagcgtttttactgattatcgccctgcgtctgtgtgagctgctgacgatgtatatcgtcaccgccttcgccctcaactactccacgcaaaacctcggcctgccgcgcgagctgtttctcaacattggcctgctggtgggcggtcttagctgcctgactatcccctgcttcgcctggctggcagaccgctttggccgtcggcggatctatatcaccggggcgctgatcggcactttgagcggtttcccgttctttatggcgctggagagtcagtccgttttctggatcctgttcttcgccctgatgctggccaatatcgcccatgatatggtggtctgcgtccagcagccgatgtttaccgagctgttcggcgccagctatcgctatagcggcgccggcgtcggctaccaggtggcgagcgtggtcggcggcggctttaccccgtttattgccgcggcgctggtcaccttctccggcggatcgtggcacagcgtggccctctatctgaccgcaggatgcctgctgtcagcgctcaccgcgctgatgatgaaaaagcaccccgtcgactgacccaccagcggagggcgtaacccgcgccctccggtaaggagaatacatgtctcagttaaccctggccgactgctggcctcgccgtttttccccctcttcgctggcgctgcagttttgcgaggatcccacccaggcggaacagccgctgtttgccaaagccagcgccggcgaggccgtcgcccagctctggcaggcgccgcagggattggtggtgccggggagctatcgtcagtttacggatctgccggcggtcagcgcgcattttgccgcgcgcggctggccggtatggcttcgccgctccggcggcggtctggtaccccaggggccgggcattatcaaccttagcctcgcctggccggtgcagcagccgctcggcgaagccgccgaaccaatctatcattcgctgtgcgctgtgctgcagcgcaccctcgcgcgcttcggcgttgccagccacccccgggcggtgagcggttccttttgcgatggccggtataatcttgcctgcggagaaggcgcggaggcgcgcaagattgtcggtaccgcccagtactggcggccgctggcggcgggcggcggccacgtggtgctggcccatgcggtgatccttattgacgccgatctgagcgcggcgcatcaggcggcgaacgccttcgaagcgcagctcggcagcgagcgggtctattgcgctgacaagaccgttactctcgcgcagctgcttcccggcgagcgccatctgctgccccgctttagcgaggcgctggcgcaggagctggacgcgtctcgctgaaggtcgctttcaggtagcggctgaaggtttccaccgcgcgcgacacgcgcggggtatagggccggatgacgtacagccgatcggcaaacacctctactggctgccacgccggcagcagctcctgcaccagcccgcggccaatggcctcccgggcgctgaaatccggcaacagcgccaccccaagccccgccagcactgcatcacgtagcgactcgctgttattggtggcgaatggcccctgcacgttgatggtcacccgagcatcgggcgactgacgggaggcgaacgtccactgcgggcgctgtggcccacggggataggtcaggcattggtggtggcgcagatcttcgggggtctccgggcggccatggcggcgaatatagtcggcggacgcgacggtaagcgtcgcggtgtgacacagcggccaggcgacgtgggtatcggggagcgcctcgcgtcgacagtggcggatggcgagatcgaacccttcgctggccagagagaccagccggtcggtgacctcaagctgcagatgcagctggggatgctgatgcaaaaacggcgcgattgccgggaccagctgctggcgggaaaaggccaccggcgcggtcaggcgcagcgttccccgcagcggcccgccttcatcgcaggcgccggtgaaaatatcccgcagctgaccaaacggctcgttgagctccgccaccagccgcagtccgtcgtcgctgaggctcacgctgcgggtggtgcgatggacgagggttttaccggtcacccgctccagctcgctgattttctggctgatagccgacttgctgatccccagcttttccgcggcccgggtatagcttttttgttcttccagcaccgtcagccagtacagatggggccagtaactctccggacgactctcgctcatgtgattgttcaccagtaaaaacaatgtattcaactatagcggtttttgccgacggcggcatcggctagcatcttgttgagcccatcattattccctaacgataaggagcacctgcatgccattactgacatttgacctgattgaaggccgtacggaacaggaggtcaaaaccctgctggatgccgcccatcgcgccgtgctacgcgccttcgaggtaccagaacgcgaccgttaccagattgttcatgaaaacaaagcccaccatatggtgattgaagataccggcctcggactgacccgcacgcgggatctggtggtggtgcgggtctataccagcccgcgcagcgaggcgcagaagcagcgcttcttcgccattttgcaggaggagctggcggaacactgcggcctgagcggcgatgacctgatggtgtcgattatcagtaacaagaaaggcgactggagctttggccgcggggtcgcgcagtatcttaccggcgatctgtaacccgcagcccgcagtacacccttagcggcgggctgccgtcgcgatacgctgccgcgcctgctgctcgatattctccagcaactcctggacatcgtcttcatcaatgtcgaggaactggccttccagcagcgcggcgtgaatatcttcccgggtgaccgaaatacccagcggcaccgccctggatttgacctcctctgccgccagcggatgcggataacggcggccaaccaggttattaaacacaatagccagcagcgccagcatcagcgagttgaggagcaccggggtcagcacaaagtgatagccttcgctgtgcaccccggcgccgccgaggatcgccgtcagggccaccgcgccgccggggggatgcagacagcgcagaaaatacatcccggcgatggccagagccgccgccagaccgcaggccagcgccgcatcggggaccagcatacccaccgtgacaccgatcagcgccgacagcacgttgccgccgacaatcgaccacggctgcgccagcgggctgctcggtacgccaaacaggagtaccgccgaggcccccatcggggcaataaaccacagattgacttcgccgagcagccagtggctgaacatgctggtcaccgccagtccggtgccggcgccaatggatcccagcacgatatgccggcgggccaccggcagcgcgtgcggcttcaggcggccaaggaaaatccgcagccgtgaaaatatccccgcaggaataacactcaacatcgcttcatcgctcaaatcataggaattacttatattttattttctttttttaaccttaaattaacaaccctgtctttcgcaggggatagcgcgggcggcgatgtccgacggcattgtgctgtgaattctcgcgggggctgatagaatcccttttcggtcagggggataccccttttgcgaattgaaggtcataacccagtgaataataaaatctctttagcgaaagaagtggcatgggccagccagaatatgccgcgtaccctgcgtcaggtcgccgcgctgcccgacctcagcggcgtgcgtctggcctgctgtatgcacctcgacatgaaaatgatcccgctggtgcaggggatcctcgacaagggcgctcaggtctttttaaccacctgtaaccccaccaccgtgcaggacgacgtggtggcctggctggtggagcgcggcgccgaggcctgcgcgtggcgcaatatgagcgatgccgactggcaacagtcatgggaaaaagcgattgcctggcagcccactcacctgtgcgagatgggcgccgatatcaccaccctgctccaccagcgcggcgagtttgggaacatcgtggcgggtctggaagccaccggctcgggcgtcaatcggctgggggatattcagccaggctatccgatctttaactgggacgatctgccggtcaaagaggggctgcacaaccgccatatggtcggtctcaccgcctggcacaccttcttccagaccactcacctcaccctgcatgagaaaaaagtgctggtgatcggctacggcctggtcggccaaggcgtcgcggcggcggcaaaagcttttggcggtcaggtgatggtggcggagatcgatcctgcccgccgtctgcaggcggcctacgacggctggcacgtggtggacctccaggaggctatcgcctcggcggacgtggtggccacagcgacaggcggtaaaaacgtggttaatcgccaggcgctggaccgggcgaaagcgggagtatttatccttaacgtcggccacgtggcggaagagatcgacggcgagtacctgcgccagtacccccaggaagaggtgatgccgtatatcaacgcctaccgcatggccgacaaaaccgtctatctgctggccaatggttcgatgctcaatctgaccgctggcttcggcgatagcctgaacgcctttgacgtcaccctggcggtgatggccagcggcatccgccatattgtcaccgacggcatgcgcgccccggcgaaggtttatctcctgccccaggcggtctggcagcaggccctgtaaacccggcgcatcacccccatcgcgggacgatgcgttttaccatcaggacgacggcgcgctatcgggcaacacaatattgctctgcgccagcgttcccatctggttgtacatcacgctggcggcatccaacaggtgcatcgccagcgcggcgccgctgccctctcccaggcgcatgtccatatcgagatacggccgcagacccagcgcgtcgagggcgatctgcgctcctttctccgccgacaggtgtgaaggaataagataagggtgcgccgacggggccatgcggcaggcggccagggcagaggcataggagaggaagccatccagcaccaccggcaggccacaggaggccgccccgaggatcaccccggtcatgcccaccagatcgtaaccccccaccttcgccaggacatccagcccgtccgccgggttcggctgattatgggctatcgcctggcgcaccaccgccaccttatggccccgctgcgccagcggcagattggccccacaacccaccaccgcgtcagggtcgctgcccgtcaggacactgatcgtcgctgcggccggggtggtattggccattcccaattcgccgacgccgaaggctttcaccccgtcggcagcgagctggcgggtgagctgcatgctggccagcagcaccgtctccgcctgctggcggctcatggccgccgtccgggcgatattcccgctaccgcgggccaccttgaggttaatcaggcccggcagcgggtcggcatcgatgccgacatccactacctgcaccctggccccggcctgcgccgccagcacgcagacgccggtgttgccccgcaccatattgccggcatgaatggccgtcaccccctgcggcgaaggggtcacgccttcatgccagacgccatggtcggcgcacatgaccacaatcgctttctccgccagcgccagctgcccctgcaagccaggcagaccggccagttgcaccgccagcgtctccagacggccaaggctgccgggcggctttaacaggccatcaatatgctgctgagcgcgcgccatgcccgccacatcgggctgcggaatggcagccagtaacgccgaaagtgttcccattctgttcctcaccgttggtgtcaggccttacagcagcgccagtaaaaagagtaattcgcccagctcaatcgccgccccgagggtatccccggtctgcccgccgagggttcgcttcagcgcccatcccagaccccaaatcagcaccagggtgatcagcgcggcgcgcagcccctgcagccccagcagggcggtggccagcgcgatcgccatcgccatcgtcaccagcgtctgctgcaggctaattttgccgataaacagattgcccagccccttttcccgcgcatagcgatgacgatacatcagcagcaccgccatcccgcgaccgacggcgcaggccgccgccagggctgcgatggggtggatatcacgcagcagcagctcgccaaccaccagcactttcgccaccagcacaaagatcagcgccagcccgccgtgggtgcccagccggctgtcgcgcatgatctccagcatccgatcgcgggtgcgggcggagaaaatgccgtcgcaggtatcagccagcccgtcaaggtggaatccgccggtgagcagcgccagcgccagcacgccgaacagcgccgccagcgggacgccgcaccacggctgcaggaggagcgccaccgcgccggcgatggcgccaagcagtaaaccgaccagcggaaaggtgacgatactgcgctggtactgttcgatctccaggccctgagataaccgcgccgggaccggcaggcggctgataaacgagagtgcagcaaagaatgacttaatcacgtgaggttgactcctgtcggcgaaagcagcggaagagttctgtcgcgcccggtcagcacctgagtttgtcttctggcgaatcgatcgtcggagaggtgagaggtgttgagatatcgccctgacgccgctgcgtcagatgcccggccaggatgagagaaacctttccgatatcaatacgtttttcgcgggccagtatagcaaagtgtcggtgaggagaggcagttgccggaacaaagttttcgcagaaaaaagcagggaagagagggaaacgcggaacagcccggcgacgcttaacgccgccggaccggcagggtttagccttcgactttggcttcgcccatcactttcagttttttcgagatgtcgcggcgctctttagacagctcggcatttttgatgatgtaatcatcaacgcgatcttcgtaatcgctcttcatgctggcgatgatgccctggatggcttccacgctcatgcccggtttgatgtagtcgctgaggttgtccagcagcagaacgcgcttctggttatcacggatctttttctcaacgtcctgaatttcacgctgcagtttgttcttacgacggtacagacgaacaaactccagtacgtcctggaaagaaggcttagttgtttccatttttacacccctaataattgagattcggattcgtaaagcgactgcgttatagggctaacataactgctagcagccgctgatgacaatgttttttcctttgcgtttatcataaccctaaacgctgctgaatcgaaacaacccatgtggttacccggtgcatctgatgtttatttgcgcaacgcgcggcagatcagatgcgagagcagctccagctggcgcgccagttcgattgagagccaaacatagccatggaccggggtttccgccaggccgtcatcaccctgctctttcagcagctggcgcagttcgaggacgatctcagtcagcttttcattgttggcgcgcacaggctgagggttcccttcgtacagcgcgtgggcgatggacaacagcgtctgctgggtcatctgctgcgtctcccgcagggtgtgcgcattgagcatcacgaagtgacccggacgcgttgcccaccaggcgttgatctgcagctccagcatgcagacgaggttgcggctgacggtctggatagcctcgaagatcgccttctggatgtgcgtctctttgctggcgggggtgatcagcccgcgcattttaaccacgtcgttcagcgcctgctggagatgcttttccagccgcggtcgatccaccagatttggcgagaagccggcctggtagaggcggttaaagttggtgacatagctggccatctggatgcgccagtggatgaacgcccgctgcggccagatgccggtaaacagcatcgccagcagcgagccgaagatcacatcgccgcttcgccacagcgcggtatgcatatcgccgggcggcgccccgaccaccaccgacagagtaatgccgatcagcagcgcctgatagggtttcttgcccagcgccagccagccgcagaggaacatcgccgccgcgcaccagaggaccatcagcggcagagagatgagctcaagcttcagcgccaccagccccagcgccgaaccgaggatcgtgccgccgatacgctgaaacgcccgcggcacgacgttaccccagaaggagatcggccccatcaccaccaccagagtgatgagaggccaggttccctcaggcacgttcagcagccgcaccagcaaaaaggtgagcacaaaggccagtgcaatccgcacaccatgcaccacccgataatggcgatacaagcggatctcaaatggcttgagtgatttatcagcgcgcacaaccctctccggcaaaacgaaaaggccaattgtaactgctttttcgcccggagcatgccgggaatgtaaaaaaccttgtccgaaacaggggtaaaccgctacgacgcgacgcgctcaacgggaacatacatgtcgatatcccagtagccgtcgtggttgccgtcgttaagatagacctcaaagcagggctggggggcgatgcgatacgccgtgctctgctgcaggctgtcgaaaaactgcatccacggggtggcgaagtcgtaatccaccacccgcgcgcgggcgcaggcgtaatccccgccggcaatcgccgccaggatcaccccttcgctgttggcgggaatgacataatcctcatccacggcgaccgctgtcgcgcagcgcagtttttccgccggcacttcctccgggttatcgtagtagacggccacccattcgcgggcgggcacctggtggttctcaacccacatcatcagttgctcaaacccctgcttgacggtgtgatcccagggcccgaccagatggaaaccggcgatggttttcttgccgagggtggtgatgctgtagttcatcttgcctcctttggagataaattgtcgcggtagggatacccgttaccggataccccccgcacagatcccggcgtgcgcgatttacgcaccgggctcctgcctcgggtgtctggcggtgaaccgctccacaggccatggatgaagaacccgaacccttggtagccatgcggctgccagtttgtttgctttcgtccaggtcgtatcatccttctggctcctgcgcctgagcgcccggcgccagaggtttgttacgtgtgtcctgaacttctgcatggtggggaagttgcccggtaccgagtgatagttcaggtatccctgaaccactctcctgagccattttccctgttcggggattgagtaatgccagcgccttcgcagaccgtctttgatggctttcagagttgccgtcatccgatcccggcgggtctttcgtatcagcatgaacctgccgttgcgatctttcccgctgatgtgcgtgaacccgaggaagttgaacgtttctggtttgccttttcccctgatggcacggttttcggcagcgaagcggccgaactccatcagacgggttttctccgggtgaaccgtgagtccgaactccctcagtctgcgctgcatggctatacggaagcgccgggcatcgtatcgtttgtcgaacccgatgacgatgtcatcggcgtatctgaccattaccacattgcctgtggcatagcgacgtcgccactgatgcgcccacagatcgaagacgtagtggaggtatatgtttgccagcagcggtgagatgaccgcaccctgtggggtgccttcctccgttgctcgccattgaccctcctccgacgtcccggctgtgagccacttacgtatgagcctgattaccctccggtcgccgatccgatgctctgtgaacctgatcagccattcgtggctcaccctgtcgaagaactgactgatgtcggcatccagtacccagtttacgttagtgcgtaccagccctgtggccagtgcgtccagtgcatcgtgctggcttcgcccgggtctgaacccgtatgagaaccccataaagtcgttttcatagactgcgttcaggattttcaccagcgcatactggacgatcttgtcctccagcgaggcgatgccgagcgggcgttgttttccatccgcttttgggatgtagtgacgcctgccgggctgcgccctgtagctgccctgatgtagcctccggtgcagatctgttatgttgttcttcatgtttccggcgtagtccatccacctgatgccatccactccggcggccgctttcctgctcagggagaggaatgcggcttccagtgcttcgactgtcagcaggtggaacaatgctgtaaaccgttctttcttccgctgcttcgcagcttcccgcacgcgtgacagcctctgtgacatgctttcccggctctgtgtccggcgcatgtgtggctgttccgcgttccccttggccccgctccttcgctccactgactccgctcctttcgggttgttcgcctgcttcgccgctactatgagcgagtccgacttctcctctccgtacatcaccggctatgactcctcgtcttcccggtgcgggccatctccgacactggcagatggtcagaggggagatctcccggttcccgcgtagagatcgtattgacatgccagggtctcagaccccgccgggtccatgtggcactcgcagtatcgcaccctatgatgttgccttccgttaacagtacaacgtcggcacccggtaatttaatatacatttcgtggctcaatggctggcctgtcaacacccctgtcaacgcttcgccccatacctcgcggtatgcaacgcatgactcggggaccttgtggattgctggtccttcaatggtcggggactttcaccccttgatctctaaccggtctcccggcgcacactgtatgaatatacagttaatttaacaggagatccccctcagtatgtgcgcgaattcacagagtcgccaccacactgctgtaaaaacaggcgccccgccagcacgagcgacagacgaaaaaaaaccgcctgcaaagaggcggttggcgtggttacagctcgtgatgcaggtaatcgctcattcgcgagaacactccgcctttattgatgctttcgagggtgaccagcggatagtgccccaccaccttgtcgccgtcatacagtgaaatctcgccaacccgctgattggcggcgatcggcgcctcaagatccttcttatccagcacatatttcgctttaatgcgcgacacttccgccttcggcagggctaaccagaaatcctgatcggtgccgagcttaatctgctctttatcgccgtaccagatacgctcggtgccgaccttctgccccttctgcagcacctgcacggtgtcgaagttctgctgcccccagtgcagcagtttagcggcctgctgctcgcggcctttcggactgtccgcccccatcaccacggcgatcagccggcgctggccatccaccgccgaggcgatcaggttgaacccggcgcccgaggtgtggccggttttcaggccatcgacgttcatggttttatcccacagcagaccgttacggttttgctgggtgatcccgttccacgtcaggcttttctggctgtacatgtggtagacgtctggttcgccatgaataatcgcccgcgagagcaccgcgaggtcataggccgaactgtgctggcccggggcgtcgaggccgtggacggtttcgaaatgggtgtcccgcaggtgcagtttttcgacatactgattcatcagggcgacaaactgcggctggccgccggcgacatagtcggccagcgcgacgcaggcgtcgttaccggagtcgacaatcagcccacggctgaggtcgcggacgctgacgcgatcccctggctttaagaacatcagcgatgacccgtcgaacaccgggttgcccttcgcccaggcgtctttacccacggtgacgatatcgtcaaaggtgatacgatggctgtcgatggcgcgatcgaccacgtagccggtcatcagtttggtcagactggcaggattacgctgctgatgttcgttacccgcggtcaggacctgaccggtggtgtaatccatcagcacccaggagccagcctgaatggaaggcggcgcgaccgtagcaggtaagtcgacggcaaatgcgcaggaaacgctcgaagcgagcaaagatacagcaataaacaaacggcctttcaacggcatatcctctagatttacagatccgccgtcctttttacggaacttcgcgtttcatatcagggtttaattgcaagaaaatatgacacagcagaggaagttgcttgccgttacccttctgatgaccgggcaaatcgtttaccataccggtcgcacgccaccacggataatgaacagactatgcaagatagcgtcaaccagcccggatttttattccacgattatgaaaccttcggcaccagcccttccctcgaccggccggcgcagttcgccgccatccgcaccgacgcggagctgaatgtgctcggcgagcccgaagtgttttactgcaaacccgctgacgattacctgccgcagccgcaggcggtgatgatcaccgggatcacgccgcaggaagcgctggccaaaggggataatgaggccgcgtttgcccgccgcatccacgatctgttcacggtgccgcaaacctgtatcgtcggctataacaacgtgcgctttgatgacgaagtgacgcggaatatcttctatcgcaacttctatgacccttatgcctggagctggcagcacgataactcgcgctgggatctgctcgacgtgatgcgcgcctgctatgccctgcgcccggaagggatcgcctggccagagaatgacgaagggttgccgagcttccggcttgaacatctgaccgtcgccaacggtattgaacaccagaacgcccatgacgcgatggccgacgtatacgccaccatcgccatggcgaaactggtgaaaacccggcagccgcggctgtttgattatctctacagccaccgcaataagcgcaagctggcgacgcttatcgacgtgccgcagatgaagcccctggtgcatgtctccggcatgtttggcgcagcgcgcggcaacaccagcctggtggcgcccctggcctggcatccggaaaaccgcaatgcggtgattatggtcgatctggcgggcgatatggcgccgctgctggaactggatgccgatgccctgcgcgagcggctttacaccccgcgcgccgagcttggcgatctgccggcggcgccgatcaagctggtgcatctcaataaatgtccggtgctggctcaggccaataccctgcgcccgcaggatgccgaccggctggggatctccattcagcgctgtctggagaatgcccagctgctgcgggcgaatccgcaggtgcgcgagaaagtggtggcggtctatgccgaagccgagccgttcgtgccgtccgaaaacgtcgacgcccagctttacaatgggttctttagcgatgccgaccgcgcggcgatgaaaatcgtgctggaaaccgaaccgcgcaatctgccggcgctggatattaccttcgccgataagcgtatcgaacgcctgctgtttaactatcgggcgcgcaacttccccggcacgctcgatgaacatgagcagcagcgctggttagagcaccgtcgtcaggtgtttacgccagagtttttgcaggcctatgccgatgagctgcagatgctgtatcagcagtatgcggatgataaagagaagctggcgcagctgaaggcgctgtggcagtacgcacaggatattgtctgattggctgaaattcccgggttgcggctaacgccttgcccggactacaaacgatgaccggggaggacgcctgaccgtaggcccgcgcaagcgcagcgccgccgggcattgcgtccccagttcgtgcttacctttttgcccggtggcggcttcgccttaccgggcctgggcgctggtaccagagtagcccgggtaagacgcctcgcgtcgcacccgggaacgttgcttagcttttcgcgcggctggcgatgatttcatccgccacattacgcggcgcttccgcgtaatggtggaactccatgctgtaggttgcccgtccctgcgacatcgagcgcagcgtggtggaataaccaaacatctccgccagcggcacgtcggcgcggatgatctggctgccgaagcgctcttccatcccctgcaccatcccgcgacgggaagagagatcgcccataatattcccggcgtactcttccggcgtctccacctcgacgtgcatcaccggctcaaggatcaccgggtccgctttgcgcgcgccctcccggaagccgaagatcgccgccatgcggaacgccatctccgaggagtccacgtcgtggtacgacccgaaggtcagggtcgctttcacgtcaaccaccggataacccgccagcacgccggtgcccatcgcttcgcgcagccctttctccacggaagggatgtactcgcgcggcaccacgccgcctttggtggcgtcctcgaagacgaaaccgctgcccggctccagcggctccagggtcagcacgacgtggccatactgccctttgccgccggactggcgcacaaatttgccttccacgtccgtcactttcttgcgcagggtttcgcggtaggtgacctgcggacggccaatgttggcctcgacgccaaactcgcgcttcatccggtcgacaatgatctccagatgcagctcacccatgccggagataatcgtctggccggactcttcatcggtatgcagacggaacgacggatcttccgccgccagccgctgcagcgcgatgcccattttctcctggtccgctttggtcttcggctcaatcgccagcgaaatcaccggctccggaaactccatccgttcgagggtaatcaccgcatccggatcgcataacgtatcgccggtggtcacatccttcagaccgacgcaggccgcgatatccccggcgtgcagttcgtcaacttcgtgacggtcgttggcctgcatcagcacgatacgcccgatgcgctctttcttacccttcaccgggttccacaccgcatcgcctttcttcagcgtcccggagtagacgcggataaaggtcagctggccgacgtaggggtcggtcatcagtttgaacgccagcgccgacagcggctcatcgttgctcggatggcgttccgccggctggccttgctcatcaacgccctgtatcgccggaatatccagcggcgacggcatcagctccaccaccgcatcgagcatgcgctgcacgcctttgtttttaaaggcgctcccgcagagcaccgcctggatctctcccttcaccgtgcgctggcgcagaccggcgacgatctccgcctcgtccagctcaccggtttccaggtatttatccatcagctcatcgctggcttccgccgccgccgagaccattttctcccgccactgctgcgccgtcgccaacagctcgtcagggactggcccatagctaaaggtcatgccctgggtggcgtcatcccacaggatggcgcgcattttcaccagatcgacaacgccggtgaaatgctcttcggcgccaatggggatcacaatcggcaccgggttagccttcagacggtcgatcatcatctgcaccacgcggaagaagtccgccccggggcggtccatcttgttgacgaaggccagccgcggaacgtggtatttattcgcctggcgccagacggtctctgactggggctgcaccccgccgacggagtcatacaccatcaccgcgccgtcgagcacgcgcatggaacgttccacctcaatggtgaaatccacgtgccccggggtgtcgatgatattgatccggtgcggctcgaagctgcggtccatacccggccagaagcagcttaccgccgccgaggtaatggtgatcccgcgctcttgctcctgggccatccagtcggtggttgccgcgccatcgtgtacttcacccaacttatggctcatcccggtgtaaaacaggatgcgctcggtggtggtggttttaccggcatcgatatgcgcggagataccgatgttgcgataacgttcgagagggatgggtcggggcatgatgcgtccttagtcgttttgacggtcagtctgcggtcggaatgatccgcagttcatttaactgcgtctatcttagtacaactgtacgagtatattcgaactatttttgctatcattacgattgggcaggttgcggcggcgcgcgtggtatcagaaccggagtttgggtatagtagccgccagccgccgatatgggctgcggctgcgatgcgccgcgccaccgccgacacaggattattatgatcgccaatcaccccgaacgagaacaaattcgcctggaaaatgtcctttccgcgctcggaaacccgctgcgactggagatcattcgtacgctggccgacggcagcgagctgagctgcaacgccctgcgccaggaggaggtggccaagtccaccatgacccaccactggcgcgtcctgcgcgacagcggtgtgatctggcaacggcctcagggacgggagaacatgatttcgctgcgccgggaagatctggacgcccgttttcccggcctgctggatacgctgctgaaagttatggtgcaggcaggataagctcttctgccgggtggcgcttcgcttacccggcctacataaccattaaatttcagaaggttaaccatcaccgtaggcccgcgcaagcgcagcgccgccgggcaaaagatatcgcaccgagccaaacgaaaaaaaagccggaggtttccctccggcttttctcaatcacatcacgctacgccttacgccacgtcttcgtactgcggcaccgggttgcggaagcttttggtcacgcaggccagatagaccagaccgataccggcccagatcaggcccagaatcatcgagctctcttccaggttgacccacagcgcgccaacggtcagggcgccgcacatcggcaggaacagatactggaagtggtctttcagcgtcttgttgcgcttctcacggatccagaactgggaaatcaccgacaggttaacgaaggtaaacgccaccagcgcaccaaagttaatcagcgccgtcgccatcaccaggtcgaagttaatcgccagcagcgcaatcgcgccgaccaggaggatgttcatcgccggagtgcgccaggtcgggtgcacgtatccgaagaagcttttcgggaacacgccgtcgcggcccataacgtacatcagacgcgccacgccagcgtgcgccgccataccggacgccagcacggtgatggtggagaagatcagcgcgccaacctggaaggctttacctgccacgtagagcataatttccggctgtgacgcatccggatctttaaagcgcgagatatccgggaagtacagctgcaggaagtaggtggcaaagatgaagatcaggccgccgatcagcgcggtcaggaagatcgcgcgcgggatgacgcgctctgcatctttggtctcttccgacaggttgctgatgccgtcgaaaccggtaaacgagaagcacaggatcgtcgccccggtaatcatcgggatcacgtgcgcgtcaccggaccagaacggacggctgctggccagcgtaccggcgccctcgccttcaaacacgccataaatcaccatgccgaggataacggcaatcagcaccacctgcagcaccacgatcacggtgttgaagttggccacggatttaatgctgcgcaggttaaaggcggtcataaaggcgaccagcgcgataacaaacacccacgacggaatcgaaggcaccagcgcttcaaaatagattttcgccagcagaatgttgatcatcggcgcgaacaggtagtcgagcagcgaggaccaacccaccataaagccaacggtcgggctgatggatttctgcgcataggtatacgccgagccggcagaagggtaacgacgtaccagcttgccatagctcagggcagtaaacaggatagcgattaacgcaaaggcgtaggccgtcggcacgtgaccgtcggtcataccagagacgataccaaacgtatcgaacagcgtcatcggctgcatataggccaggcccatcattacaaccggaactaacgtaagcgttttacgtaattccacgcgagaggtatttggagtagcgttatgcgacatagttatccccttttacggtgaacgccagcgcgtaagcaaaaaattgccccatttctttctattcctcagcgacaacgactgtcggtttttagtaaatatctatccggtacgaagcccggcctcttggtattgaatgatgtgtctttcgaccaaaaaaataaccgacactttaaaaaaaagcgtcggctagtctctggttttcaggccgcatattttgcaacaaattcaacggcgttgacaagatgttatgaagttcattgcgtaagcatattttttaacgtgctaatatctatacggtttccgtatgataaattgtaaaaatagcactatttgctaatagcgtttcccgccaccatttgccagccaaaccgcaggtggcgtcattccaggcgatccacgcgcgttgacgagacgatagcccgcgcacggtcatgcagaccagctcgccgctgtccagtagaccctgcacctgatagcgcggcaggcacccccagcccagccccaggcgcagcagcgccagctgccccgcggcgtcacacaccgtcagggtctcctgatcgctgagtagcgccccgccctcgccggttgccaccgcccgataacggcgcagggttcgccagctcaacggtgcgcggtgtcgcgccagcggatgctgtggggcaacgaccagcagcagctccagctcgccgagggggagatagtcataaccgctcagcggcggcggctcgccgagcgcccccagcagcagatcggcctgcccgtcagtcagcggccgccagtccagcagggaggggttcagcgtgaagtgcagccgggtcagcggctgttgttgataaaatgcagcgattggcggcgagagcagcgccacgggaaaggtgctgtccaccgccagacgaaggctattctcccacccctgctgcagcttaaccgcccggatctccagttcgcgggcgatatgcagcacctcccgccctttctccagcagcatctgtccgctgggggtaaagcgcgcgcgatggccgctgcggtcgagcagctgaatattgagatcgctttccaggcggtgaatggtgtagctcagcgccgagggcgttttaaagagctttgccgacgccgcggcaaagctgccctctttttccagggcatccaggatcacgaggacatccagcagtggtttcatcgctacccccttacggtatgcgaatcaccgctggcggatcactccatcggcatcaccagcggatcggggtactggtactcaaaccccagctcattgcagatacgattgccatccacaatcttgccctggccgccgtccgggctgtcgctgaacaccggcggcggcagaccgagctcgcgggccatctgcggataaaagaggccgcgcgccggatggcggggcgcacatagattatagatgtgcccgcccttcggggcctgcagcagcagttcgatagcggccaccacatcctgcaaatgcaccagattgaccacgtgctggccatccggcgccgacttgccggcgaaaaaacgtcccggatgacgggaaggccccaccagcccggccaggcgcagaatatccaccgatgtccccggcaggttgtgcagccagtcctccagctccttgagcacctgtccgctggcggtttgcggcagacgcggggaattctccttcactgtaccgttgacgttgccatacaccgaggtggagctggtgaagacgatccgcggaatatggtaagccagcgcggtatcgacgatctcctgcaccgcctgtagataaaacccttcccctgccccggtacgccgggccggcagggtgatcaccagcgcatcgacgttcatcagcgcgtcgaggtcctcggtatcacagaccagctgtggctccaggcgcagcggatagctgtcgatcccgcacatccgcgccgcctccacgccatcctgcgtagttttactgccggtaacctgccagcctcgcgccgtcaacgacagcgccagcggcatccccagccatcccaaaccgactatcgcgacctttttcatcccaggctcctgactctttcgctgtgctgattacaggctacgccagccagcggcaactgacaatttcttcgctcaatatgaaatgaattaatgatagaaaaaagcccttgctttctgcggcggaagtggtttaggttaaaggacatcaaatgcatagtcattcacagagaatttttatgaaccgcgttcaatttaaacaccaccatcatcaccatcatcctgactagtctttcaggcgatgtgtgctggaagacgtttggatcttccagtggtgcatgaacgcgcagagagcccccggaagattcacttccgggggcttttttttggaccaaattcggacagattcagacaggtattcagaggaaaagaacaatgttagacaacacccgtttacgcatagctattcagaaatcaggccgtttaagcgaagattcacgcgaattactcagccgctgcggcattaaagtcaatttgcacacccagcgtctgattgcgctggcggaaaatatgccaatcgatattctgcgcgtgcgtgatgacgatatcccgggcctggtgatggacggtgttgtcgacctcggtattatcggcgaaaacgtgctggaagaagagctgctcagccgccgcgcccagggcgaagacccgcgctacttcaccctgcgccgtctcgacttcggcggctgccgcctgtcgctggcgactccggtggatgaagcctggaacggcccggcggcgctggacggcaaacgcatcgccacctcttacccgcacctgctgaagcgctacctcgatcaaaaaggtatctcctttaaatcctgtctgctgaacggctccgtggaagtggcgccgcgcgccggcctcgccgacgccatttgcgacctcgtctccactggcgccactctggaagccaacggcctgcgcgaagtggaagtgatctaccgctccaaagcctgtctgatccagcgcgacggtgaaatggccgacgccaaacagcagctgattgaccgcctgctgacccgtattcagggcgtgattcaggcccgcgagtcgaaatacatcatgatgcacgccccgaccgaacgcctggaagaagtggttgccctgctgccgggcgccgagcggccgactattctgccgctggcaggcgacaagcagcgcgtggcgatgcacatggtcagcagcgaaaccctgttctgggagaccatggaaaaactgaaggcgctgggcgccagctccattctggtgctgccgattgagaaaatgatggagtaatcggccagccggtcacgggacacacaggggaatacaatcatgagcttcaacacaatcatcgactggaacggctgtagcgcagaccaacaacagcaactcttaacgcgcccggcgatttccgcctccgacagcatcagtaaaacggtgacggagatcctgaataacgtcaaagccaacggcgacgcggcgctgcgcgaatacagcgcgaagtttgataaaaccaccgtcgccgcgctgcaggtgagcgaggcggagatcgccgccgccggcgagcgcctcagcgatgagctgaagcaggcgatggcggtagcggtgaaaaacatcgagaccttccacaacgcgcaacagctgcaggcggtggatgtcgaaacgctgccgggggtgcgctgccagcaggtcacccgccctatcgcctccgtcggactgtacattcccggcggctcagcgccgctgttctccacggtgctaatgctggcgacgccggcgcgcatcgccggctgtcagcaggtggtgctctgctcgccgccgccgattgccgatgagatcctctatgccgcgcagctgtgcggcgtaaaaaccatctttaacgtcggcggcgcccaggccatcgccgccctcgccctcggtaccgagtcggtgccgaaggtggataaaatctttggcccgggcaacgcttacgtcacggaagccaaacgccaggtcagccagcgtctggacggcgcagccatcgacatgccggccggcccgtcggaagtgctggtgatcgccgacagcggcgccaacccggactttgtcgcctctgacctgctgtcgcaggcggaacacggcccggactcgcaggtgatcctcctgaccccggacgccgacatgggcagccgcgtcgccgaagccgtggagcgccagctggccgccctgccgcgcgcggaaaccgcccgcgtggcgctctccgccagccggatcatcgtggcccgcgatctggcgcagtgcgtggctatctccaaccagtacggcccggagcacctgatcattcagacccgtcaggcccgcgagctggtggacagcatcaccagcgccggttccgttttccttggcgactggtcaccggaatccgcgggcgactacgcctcgggcaccaaccacgtcctgccgacctatggttacaccgccacctgctcaagcctcggcctggccgacttccagaagcggatgaccgtgcaggagctgtcgcgcgacggctttgccgccctcgcctcaacgattgagatcctggccgccgccgagcgccttgacgcccacaaaaacgccgtaacgctgcgcgttgccgccctgaaggagcaagcatgagcattgaagatttagcccgcgccaacgtccgcgcgctgaccccgtatcaatccgctcgccggctgggcggcaaaggcgacgtctggctcaacgccaacgaattccctaccgccgtggccttccagctgaccgagcagacgctgaaccgctatccggagccgcagccgaaggccgtgattgagagctacgcccgctacgccgaggtcaaaccggagcaggtgctggtcagccgcggcgccgacgaaggcatcgagctgctgatccgcgccttctgtgagccaggcgaggacgcggtgctctactgcccgccgacctacggcatgtacagcgtcagcgccgagaccatcggcgtcgagtgccgcactgtgccgacgctggccgactggcagctcgacctgccgggcatcgaagcgcggctggacggcgtgaaggtggtcttcgtctgcagcccgaacaacccgaccgggcagattatcgacccgcagtcgatgcgcgacctgctggagatgactcgcggcaaagccatcgtggtggccgacgaagcctatattgaattctgcccgcaggcgacgctcgccggctggctcagcgactatccgcacctggtggtgctgcgcacgctgtccaaagccttcgccctcgccggcctgcgctgcggcttcaccctcgccaacgccgaggtgattaacgtgctgctgaaagtgatcgccccgtacccgctctccacgccggtggccgatatcgccgcccaggccctgagcgcggaggggatcgccgcgatgcgccagcgcgtggcgcagatccttgacgagcgccgctacctggtggaacagctgcgcggcatcgcctgcgtggagcaggtcttcgattccgagaccaactatgtgctggcgcggataaccgcctccagcgcagtgtttaaatctttgtgggatcagggcattatcttacgtgaccagaataaacaaccttcactaagcggctgtttgcgtatcactatcggtacccgtgccgagagccagcgcgtgattgacgccttgactgcggagaatgtatgacccagaagtatctctttattgaccgtgacggcaccctgatttccgaaccgccggaggatttccaggtggaccggttcgacaagctggcgtttgagccgcaggtgatcccggcgctgctgaagctgcagcaggaaggctataagctggtgatgatcaccaatcaggatggcctgggaaccgacagtctgccgcaggaagcgtttgatggcccgcacaacctgatgatgcagatcttcgcctcgcagggcgttaactttgaagaggtgctgatttgtccgcacttcccgggcgacaactgcgcctgccgcaagccgaaaacgcagctggtgctgccgtggctggaagagggggtgctggataaagcccacagctatgtgattggcgaccgggccaccgaccttgagctggcggataacatgggaattaccggtctgcgctatgaccgtgagaccctggactggccgaccatctgcgagcagctgacccgccgcgaccgctatgcccacgtcgagcgcatcaccaaagagacccaggtggatgtgaaagtgtggctggaccgcgaaggcggcagcaagatccataccggcgtcggcttttttgaccatatgctcgaccaaatcgccacccacggcggcttccgcatggaggttaacgtcggcggcgatctgtacatcgacgaccaccacacggtggaggataccggcctggccctcggcgaagccctgaagctggcccttggcgacaagcgcggcatcaaccgcttcggcttcgtgctgccgatggacgagtgtctcgcccgctgcgcgctggatatctccggccggccgcacctggagtataaggcggacttcacttatcagcgcgtcggcgatctgagcaccgagatggtggaacacttcttccgctcgctctcctacaccatggcggtgaccctgcacctgaaaaccaagggcaagaacgatcaccaccgcgtggagagcctgttcaaagcctttggccgtacgctgcgccaggcgatccgcgtccagggcgatgccctgccgtcttccaaaggggtgctgtaatgaatgtggtgatccttgataccggctgcgccaaccttaattcggtgaaatcggcgattggccgccacggctatgagccggtggtcagccgcgatccggaagtggtattgcgtgccgataaactgtttcttcccggcgtcggcaccgcccaggcggcgatggatcagcttcgcgaccgcgagctgatcgacctgatcaaagcctgtacccagccggtgctggggatttgcctgggcatgcagctgctcggcaagcgcagcgaggagaacaacggcgtcgatctgctgggcattatcgaagaagcggtgccgaagatgaccgaccacggtctgccattgccgcacatgggctggaaccgggtgtatgccaaagctggcgatcggctgttccgcggcattgaagaaggcgcgtatttctacttcgtgcacagctacgccatgccggtcaacccgtacaccatcgcccagtgcaattacggcgaggcgttcaccgccgcggtgcagaaagataacttctatggcgtgcagtttcacccggagcgctccgggagcgccggggcgcagctgctgaaaaacttcctggagatgtgatgattattcctgctttagatttaatcgacggcaccgtcgttcgtctccatcagggcgattacggccagcagcgcgactatggcagcgatccgctgccgcgcctgcaggcctatgccgctcagggggcggaagtcctgcacctggtcgacctgaccggggcgaaggatccggcgaagcgccagatcccgctgctgaaatcgctggtcgccggggttgacgtcccggtgcaggtcggcggcggcgtgcggaccgaagcggatgtcgcggccctgcttgaggccggcgtcgcccgcgtggtggtcggctccaccgcggtgaagtccccggaagaagtgaaaggctggtttaaacgctttggcccagaacggctggtgctggccctcgacgtgcgtatcgacgccgacggcaataagcaggtggcggtcagcggctggcaggaaaactccggcgtgacgctggaggagctggtggaaagttatctgccggtcggcctgcagcacgtgctgtgcaccgatatctcccgcgacggcacgctggcaggctctaacgtctcgctgtacgaggaagtctgcgcccgctacccgcaggtggcgtttcagtcatccggcggcatcggcgatctcaatgatattgccgccctgcgcggcaccggggtgcgcggcgtgattgtcggtcgcgcgctgctggaaggtaaattcaacgtaacggaggccattcaatgctggcaaaacggataatcccctgcctcgacgtccgcgacggccaggtagtgaaaggcgtgcagttccgtaatcacgagatcattggcgacatcgtcccgctggccaagcgctatgccgacgaaggggccgacgaactggtgttctatgatatcaccgcctccagcgacggtcgggtggtcgacaagagctgggtgtcgcgcgtggcggaagtaatcgatattcctttctgcgtggcgggcgggatcaaatcgcaggaagacgcggcgcagatcctctccttcggcgccgataagatctcgattaactcccctgctctcgccgacccgacgctgatcacccgccttgccgaccgctttggcgtgcagtgtatcgtggtggggattgatacctggtttgacgcagagaccggcaagtatcacgtcaaccagtataccggcgacgagagccgcacccgggtgacgcagtgggaaaccctcgactgggtggaggaagtgcagaagcgcggcgcaggcgagatcgtccttaacatgatgaaccaggacggggtgcgcaacggttacgacctgcagcagctggcgaaggttcgcgcggtgtgccacgtcccgctgatcgcctccggcggcgcgggcactatggaacacttcctcgaagccttccgcgacgccgacgttgacggcgcgctggcggcctcggtattccacaaacagattattaatattggcgaactgaaagcgtacctggcggcacagggcgtggagataagggtatgttgactgaacagctggactgggaaaaaacggacggcatgatgccggccatcgtgcagcacgccgtatccggcgaagtgctgatgcacggctacatgaacaaggaggcgctggagaaaaccgaagccaccggcaaggtcaccttttactcgcgcaccaagcagcggctgtggaccaagggtgaaacctcgggccatgtcctcaatgtagtgagcatcacgccggactgtgacaacgatacgctgctggtgctggtaaacccgatcggaccgacctgccacaaaggcaccacaagctgcttcggcgaaaccggccaccagtggctgttcctctatcagctggagcagctgctggccgagcgtaaacacgccgacccggagagctcctacacggcgaagctgtatgccagcggcaccaagcgtattgcgcagaaagtgggggaagaaggcgtggagaccgcgctggccgccaccgtgaacgaccgcttcgagctgaagaatgaggcgtcggacctgatgtaccacctgctggtgctgctgcaggaccaggggctggatctcggggaagtgattgataatctgaagagtcgacactgagaaaactttttatgaactgaaactgattccgattacattatatcggtaagtaaataattatcttttcctttaagggcattcatcatgtatgaatgcccttatcaaatactcatcattataaacaacattcatataagctgtttgcaacagcaaactatactttcaacacgcatttttgatttacgacacactttcagcgtaatcatagctgttttgatatgttgcatatggtctcatcccaatctcagctaaaatacatagcaatcatatataaaggtcagcaaacaaatatgaaacaaactattttcattttagcgatgagtatttttcctgttactgcattttctgaaagcacgctgatatcgccaatgattggaggtattgacatctgtcagtctgcaatcaaaaaaggaattatcaatacatatgaagcagcaaaatactgccagtcaataaatgaaacctcgtcctcacttatcgagagaaaactatctgaatttggtcctgaaaaaagtaaggatggtaaatttcagataggctatatgctgagtttcccattattatcttatgttaagatgcataatgatggctcgtatgagatcgacaaaggaaaaatacgctatcgtttaaaattactccaagacacaaaaagacaagctgttatttatcttttctcgaaccacttctccgtttccgagggtgcaaaaactgaagagttaatttctaaaatagatggcaaacacatgatgtaattaagcaatggcatagttcctgtcgacaactatttttccagcaaaacatatccatgggcaattaatgcaagcaactcattaattgataagatacgcaaagacgcaattaatgaggttttatcgcaaatctgtgctatagatatagtagaccaacaaaaaattagagcagtgaccgtccttggtgaagttcattataccttccccgactttttcaatggaatggattaccgtggtgaaatgcaactcacagattactcagaaaaatcgattaaaagattcagaaattacttatttgataaatatagaaatataaaatcactcaatgatacacttggttcagaatatagatcatttaatgaaatcaacccaccatcaaaaaatacaaacactgtgcatctgaataacttttttgagcaccttgattatgcttcatcgggaaggttagcaatatatggttgggcagcaggaaacggtcaaggtccagctaaagtcaggatttttatagatggaaaagatgtggggtatgcagaaagcgggctcagtcgaatggatgtatatcaggccatcccaacattgggcacttcagttgtagggtatcgatattatcttgattttcgaaagatgagtaaaggaattcatgttgtagatgtcgtccatgacgataatgggaaattgacattgatgaaaagcatagatgtgccggtaatagatcgacaacaaacaaaacctgttcgtgtcggagaaggcataaagttgcccgaagagaaaagcatgaagttctggaatgattatcctgagacattacaaccagtgtattacaatccattgtccgaggaattttataactttagaaaaaaagaggtagcaagagagatacaaaaatatgcagatattgtaagctcatcatgcattgggagggatagaaccttttctcaccaaatagcgccaatgtttaatgcagactggaatgaggaaaaaattgcagttgaagactcacttaaaaagaataatcattataacattagattaaatacctatggttcagcattttatggtgactatatatttaactggttaaaaagtctggaattgaaagttatggaatcccagaagtgcaccctatggttgaaaacgaagaaatcatctatgatgcattggaacatcatcataacaatggtgcaatattcattagcccttactatttagaaatcaaatcagaaagttttggcgtcgataaagaacacaaaaaattcagtatcaatgaaaataacacaaattattattcatcaagtttctatcatgccctaagcagaatcatgaaagaatagtgagcataacattttgtgtcaataaaataattatagaggctcgggcaagcacaaaatgcttgcccgataggtcactctcttcattcacttttgcaagagaaggaaacaatgcccggccatataacactatctagcctaatttggggtaccaatacttatcgaacaatttcatgtaatgcacgacgcgatagttgtcgtttcacatatcgttgcaaacggtaggggataagtttggttgcccaagataatgcaggattttgccgcaacatccataatacagccaataatttttccttccttccatgaggttgagatattttttcttcagctattgtgatgttctctgaagaatagaaactatctatcaaagttttaaaatcaattctgccaagctcgctttcacgccaccatgaatcacgaatataataatcttgatagaaatgatcaacacgtgtttctgacgaaacatccggcataggatcaacattctgttgctggaaaaagccatcgaaatctgcaatagcttgtcgccataactcactcattctttggaaagatatatcccaattaataatccggctaaattttcgtccgatgagtcgttcgccaaaggcaccaatatttggtacaacaaccggtaacccatattgaagtgctgcactcaacgtataactatatgtctcaggccattgcgcagggaaccacattacatccggagcaatatcattgagttttttctctaaatcctgattagaatacgcaccatggcaaataaccgcatcatttagcgtactacaagcgtagccaagaagatggaactcaatgttttctcttttaagtgcatgcgccacctcatccagcatgaaagcgcccttttcacgactgatagcgccaaggacaaggactttcagtttccgatcacccgtgtaagttttcctgacatcaggatatggagcatttttttcgtaatcaggatgccatgcgatgacagccttctcagaaatatcgggaaaatatcttgtaaaccgaaatttagtatctgccgacgggaaaataactcgctcagccccaaataaccacgcattcatatttgaacgccatgtggcagctgacattccaacaggtaacggatatgtttccgcgcataattcgtccatgtttgttgtattatcgccaataaaaagaccatttttgtcggttagcgatgggtttccatttattgcaaagtagtcatgaattgtgacgtcataggagcattttaaatctaaatgcagttttttgatcttctcagggattcccatcaaatgatggaaatggatatgcgatatacccaaaaagcgtaataatctcagcagatcatcatagccattttcaatatcaacagagatactttctttgcatgtgcgtccgtctgcactcaaagagatcactacgctactgttgtctgcattaggcattaaaataaagaagcatgctcttcctttgtaaaaattagacaactcttcgagatgataggttgtcccgccccccatatgatgagaaaccagcagtattttctgaagatttgctttcgccagaatgcgcagtagcattcgctggcgagcttgcttagcaggatctcttgaaataaactccattacatcacgggtatagtttggatgtaattcattaaggagttccatcgcgcgtattttgcgcgggctttgctcgccagcgaaactaactccgcctttgtgataaacaaagacattcaattgatgaaagttaggccaaccggcttttgcagcacgttgacaccagtcattttcctcaccataaccacgaccgaaagtctcttcgtcaaaatatccaacctggtttaagcagtcacgacgaatgtacatacaaaaaccaacacctgttggtatctcgacaagattattttctttgccataagtttcaaattcatcatcgagagactggacatccattccggaaaataattcattatcttcacagaaatttgggaaactacaaatcgtcgcattatttgaaaatggagttacgctccctacacgctcacgactataagctgcatcatagatacgttccagccatttattagcgacttcaacatcgctatttaagagaagaacatcccgtttcgaatgcagtttcatgccacggttgacggttgcaacgaaacctaaattattttcgttctcgagtaacttgaaactattgtcttgtgcacgtttacgtagccaatctgtcaattcaggttcaggtgaagcatcattaataacaattaattcagcccatgaggggagggttgatattgctgactctatacattcctgagtttcctgtaaaccaccataaacgggtacgataacatcaaccagtatgtcattattatcattctcagcttgtaacaatttctcttgctgtaactctaactctagtcggctcacaatatcattcaactcaagattttttatcttcaactcttcgagctctttcaagagacctcgctcatacattccattttctacgacatctgtagtagatgttttcatatcaataatgctctgtttttctcgtgacgatagataatataggatatgcttacttaaaatttcatgttcggatggaaaggtcaatcgaaagcggatatattcagcgttaaataacaaatcaaatggaactagataagaaaataaatagaaggttagacgttcaactcgctcatcaacatcatcaacattacaaaatgcataagaacaatcccccaaaatcttcacaggaatattcattagcattgcttccagaccgacactggaattaatagttagaatttttcgacatttcttaagaaaatcgatgattgacagattgttattatcaatttcatatccaggattctcaattaatctaaaatggcttcctgggtgcggtcgtactattttttttccaataaatgaaccttcagcatagtccaataaggcttgattatcgaaactattactaaatgcaaggatattggaatcattctcaacttgcaaaactataccaacatcatattctggttcaatgtagtcatcatcgtttcgactgttaataaaaaaatcacgtaacgctgaaatgcgattttttttattaaagacaacaccttgttgtttagcagcaaagtatctcttctccgcttcagtgttgccattgacaccagaaaaatcgaaataaccagtaaaaagatacgtcggagaacgcagcggacctaattcaagatttataactggaatattatatttttctgctgcagcattcagtgatggacaattgcatatggtcagaatacattcaatgtcgttttgtttttgtaatgcagcgattagagcatttttaaaatcaggaatgatttccgtcagaaatttcttaaaaaggagattactgttatcgccacactcagttaatgcttcagataatgattcttcattaacaatatagacgttgtctttttggcgaactgaaaaattaggaagttcgtagcctaaacgtttctgtccgtcatcagtaacctcccagcgcccctcttcctgccactttgtacagggtaacaaataatcttgtgtcgtaatcaatgccaacggctctttaatagccgtcatggctttatataaaaaccacaaataaggagcttttacaccccggaacggaaatgcgggtaaataaatgccaatcatgatagttcatccccttctataacatttacaggagaatgaataacaccaccaagttctctggatgaccaaaattttacttttgcaattggacgtcgctgatcaagctcctcacgctcaccattattaaaacaagctaaaccgcaatgaacgagataatcaccagtattgataggtagcttaactttatatttaagcttccgaagccccggagccaagtcaatcttatgcccggcaaaaatattattatccccccagatatccccgccttgggtccgagatagtgaaacgcctaagactacatcatttatattttctgatgagtttagcttgaaagaaaaataaatttcttcatttggttttacaagtggcttttcagagagaggagtgccatctgctttcataattgagaaatcttcaattatagctcgaccactaccaaaccgtttttcatcaacttcggcattggtttgcttattttgtattgctgataattcatcagcagatgcaatttcccccgtctgggaaacagcttcttttttctctgctgtatcagtgcgctctgtcatcagcatacctttctcataggcaagaacggcagccaatacatcagtcgtattaccgactaacatgccatcactcattacaaggcagcgatctgcatattctaatatgctacctgtggaatgcgtgaccataatgatggttgttcctttttgtttaagcatttccatgcgcttaaagcacttatattgaaaaccaatatcacctacagccaatgcttcatcaacaatcagtatttcgggatcaatacatgcctgaacagcaaatgccagacgtacatacataccactggaataggtctttaccggttgatcaataaaatcaccaatgtcagcaaaatctaatatctcttgaaatttcttatcaatttccgacttacttaaacctaatacgctaccatttagatatacattatcgcggcccgaaaactctgggttaaaaccagctcccaactcaagtaacgcagccactcggccgttaacttcaatgtcaccgacagttggagtaagcgtaccgcaaatcatttgtaataatgtcgacttccctgcaccgtttcgcccaatgataccaacggtttcgccacgatttatcgaaaatgaaacatctcgtagcgcccaaaactctttaaaatagctgcgactttcacggcgaattacactttttatttttggggcaaagaattgcttcaatctgtcccatggctgggaatatatttgatagcatttgcttaaattagttacctttatcgcgatttgattagaggacatcagcaaatccttttcttgttttctggaaaaacacaaagccaagccaggcgacaatggatgctccaacagtatagagcaaaatacccataaaattaggtgcccccccccaaatcaacacagtccgagcctgctcaattataaatgtcaaaggatttagcatgatccaaatatgatatttttcaggtagcgcgctgatagggaaaaatactggcgataaaaacatcaaaaccgtcgttatgatgactgtagtttggctaacgtctctcaaaaatacgcctaaagaagccaaaatccatgataagccgagactgaaaataacaagaggaagaaaaactaaaggaataaatattattgtccagtgtataaaaccgttaaatataacaaaagcggttagtaaaaccagtagactaatagcagtatggaataacgcagcaaccaaggatatgacagataacgtctctaaagggaatattactttttttacatagtttgtattatttaatattatctgtggtgccctattgattacctcaccaaaaaaaccatggacgatcataccgacaaataatattattgcaaattgtgttctgctttcatctcctccagtcgaccatctggctttaaataccaccgaaaaaacaaaggtatacacagtcaacatgaataaaggattcaaaaatgaccataaaactcccattactgaacctttatatctgccgataacatctcgcttagtcatttgcaaaataatactacggtgagtatatatactcttaactatgtctaatggagataatgacggtttctgatgtggatttttcattttaagctctgaaataataccaaataaattaacttagctttcttgggatattacgcaatgctgattcgttgtaagcatatcgttttttatcaaaaaaccatccccacttattaaaataggtaatggccgaacgaatatgataccaaagcaacaatttacttttataagatcccttattgaaaacatgaacaattgttgtttcggggcaataatagatcttcgtaagttgtaaagcacgacgacatagatctacatcttccaggtacataaaatagcgttcatcaaagccattcaacttttgtaatagaacattcgtcaaaagcataaaacagccagataccgaaggaggtgaaaataccttatcatactcggcatcctttaactcgtatgtagcatcatacttaatagcagtggtaggaagaaagcgtcttaagaagagattactgggcgttggcaacaggcggcaactatattgacgctcaccattcttatagatgatctgcggggatacaaaattatattcatttatccatgcaaacgatactaatttatctagagactgcttatcaaaactgatatcaggattacatattaaaaaatagccatcaaaatctgaacttgctttgatggcgagattatgtccggcaccaaaaccacagttacgaggagacttaaggaaggtgcgaacaagttcctgatatgagatcatcatattcatccggagcgcatcccagagggacatcatgagccatcaactcaccttcgccgatagtgaattcagcactaagcgccgtcagacccgaaaagagattttcctctcccgcatggagcagattctgccatggcaaaacatggtggaagtcatcgagccgttttatcccaaggcgggcaatggccgacggccctatccgctggagaccatgctgcgtattcactgcatgcagcattggtacaacctgagcgacggtgccatggaagatgccctgtacgaaatcgcctccatgcgcctgtttgcccgattatccctggatagcgccctgccggatcgcaccaccatcatgaatttccgccacctgctcgagcagcatcaactggcccgtcaattgttcaagaccatcaatcgctggctggccgaagcaggcgtcatgatgacccaaggcactttggtggatgccaccatcattgaggcacccagctctaccaagaacaaagagcagcaacgcgatccggagatgcatcagaccaagaaaggcaatcagtggcactttggcatgaaggcccacattggtgtcgatgccaagagtggcctgacccacagcctagtcaccaccgcggccaacgagcatgacctcaatcagctgggtaatctgcttcatggagaggagcaatttgtctcagccgatgccggctaccaaggagcgccacagcgcgaggagctggccgaggtggatgtggactggctgatcgccgagcgtcccggcaaggtaaaaaccttgaagcagcatccgcgcaagaacaaaacggccatcaacatcgaatacatgaaagccagcatccgtgccagggtggagcacccgtttcgcatcatcaagcggcagttcggcttcgtgaaagccagatacaaagggctgctgaaaaacgataaccaactggcgatgttattcaccctggccaacctgtttcgggtggaccaaatgatacgtcagtgggagagatctcagtaaaaaccggaaataacgccagaaatggtggaaaaaatagcctaaataggctgattcgatgtgtttgcgggaaaaaaatcggcccagatccgcgaaattttaatcagcgagtcagcttgggaagaaatgacctgcttattcgcaccttccttaatataactcacttttggttcattcaatgatgcagcccactgacaaccaccattatcaacgaagataattttttcaacgctctcttcatggcataacgagagaagcgtatctttaatatcatcataggaatgattaaataatacaatagaagcaataacttttggcttcattgctttataagtcattaatcgattacctttaggataaattttttattattatttttaaatagccacttgtgatatccataatctaacaagcaaatttatacttatgcgtagacttcagctgtggcaagagtatgtgcctgcagatctttctccgacagcgacagcgcgcagtcgcccagcgccggccagtcaatccctatctccggatcgttccagatgatgcttcgctctgactgtggcgcgtagtagttcgtcgccttgtagacaaactgcaccgtgtcgctcagcgccataaacccgtgggcgaacccttccgggatccacagctgacgtttattctctgcgctgagcaccgcgcccacccatttgccaaaggttggcgatgaacgacggatatccaccgccacgtcaaatacctcaccttccacgcagcggaccagtttgccctgagcgtgcggatccagctgatagtgcagcccgcgcaatacgcctttctgggactgggagtggttgtcctggacgaattccacctggcggcccacagcctcattaaacaccttgctgctgaagctctcaaagaagaaaccccgcgcatcaccaaacacgcgcggttcaaaaatcagcacctcaggaatatctgttttaataatgttcatcttttgctatccgtttatttacccaggacttctgttaccacgcgagccacaccctgacgccagtccgggagagtcaccccgaatgcctgctggaatttttcattcgacaggcgagagttgagcggacgtttcgccggcgtcggataggccgtcgtcgggatgcccttcacttcctgaaccgccagctctgcaccgtgcgctctcgccacctcaaacacatagcgggcgtagtcgcaccagctggtctcgccgctggccaccagatgataggtaccggccagcgccggatcacgcagcgtttcacggattgccgtcgccgtgcagtctgccagcagctctgcgccggtgggggccccgtgctggtcgtcaatgatggagagcgtctctttctcacccgccaggcggagcatggttttggcaaagttggcgccgcgggtggcatacacccagctggtacggaaaatcaggtgacgcgggttgccgtgctccagcgccagttcaccggcacgtttggtttcaccgtagacgttcagcgggccggttgcctcatcttcccggcgataatggctgccggcgccgtcgaacacatagtccgtggaatagtgcaccatcagggcacccagcttcgccgactccgccgccagcaccgccacccctttgtcgttcagcaggtcggagagctcccgctcgctttcggccttgtctactgccgtgtgcgcggcggcattcaccaccacgtccgggcggacggtacgcacggtctgcgcgataccgtccagattagtcagatcgccgcacagctctttatcaaagtaatccaccgcgaccacatcaccgagcgtggacagggagcgctgcagctcccagcccacctgaccattcttgccaatcagtaatatcttcatcttgttattttcctttaatggccgtgcggcttcagtcttcactgagcagacgtttcaggtaggcaccgtactcggttttcttcagacgctccgcctgagccgccaccccttccgccgacagccactgattacggtaggctatctcttccagacaggcgaccttcatcccctggcgcttctcaatggtatgaataaactgagaagcttcaatcaggctgtcatgggtgcccgtatccagccaggcaaatccgcgccccagcagttccacctgcaaatcgccgcgctccagatacatctggttcagggtggtgatctccagctcgccgcgttcagaaggcttgacgtccttcgccatctccaccacattgttgtcgtagaagtagagcccggtcaccgcccagtccgatttcggcttcagcggtttctcctcgatggacagcgccttaaagttatcgtcgaactccaccaccccgaaacgctccggatccagcacctgataaccaaacaccgtggcaccggaggtcttcgccgccgccgcttccagttttttaccgaagctctggccaaagtagatattatcccccagcaccagggcgcaggcatcgttgccgatgaacttctcaccaatgataaaggcctgcgccaggccgtccggcgacggctggatggcgtagctgaagttcaccccgaactgcgacccgtcacccagcaggcgctggaaggaaggcatgtcgtccggggtggagatgatcaggatgtcgcgaatgcccgccagcatcaggacggacaccgggtagaaaatcatcggcttgtcatagattggcagcagctgcttggagacgccctgagtgatcggatataaacgcgtgccggagccgccggccagaacaatacctttcatctttacttcctttttagttattcaggccaaggcgctcaccggcataggagccgtccagcacgcgctgccaccaggtctggttgttcagataccagtgcacggttttttcaatcccgctctcgaacgtctcctgcggcacccagcccagatcgcgctgaattttcgcggcatcaatggcgtagcgcaggtcatgtcccggacggtcggtgacaaaagtgatcagctcagcaaagtgggtgatgttgcccggcttctgcgccaccaccttgtcgagaatggcgcagatggtgcgcaccacatcgatatttttacgctcgttatgaccgccgatattgtaggtctcgccgctcttgccttcggtcgccactttgtacagcgcacgggcatgatcctcgacatacagccagtcacggatctgctccccgttgccatataccggcagcggtttacccgccagggcgttaaggatagtcagcgggatcagtttctccgggaagtgatacggaccatagttgttggagcagttggtcaccaccaccggcagaccgtaggtgcggttccaggcgcgaaccagatggtcgctgcccgctttggaggcggagtacgggctgctcggcgcgtacggggtttcttcggtgaacaggtcatcggtgccgtgcaggtcgccgtacacctcatcggtggagatgtggtggaagcggaaagcctgcttctgcgcttccccaagcccggaccagtagtgacgggccgcctccagcagagtgaaggtgccaatcacgttggtctggatgaaggcagccgggccatcaatggaacggtccacatggctttctgccgccaggtgcatcacgatatccgggcggaactcgctgaactgggccgccacggcagcagcatcggtgatatcagtctgggaaaacgagtagcgttcgctcacggccaccggcgccagggattcgaggttgccggcgtaggtcaggcagtccagcacgcggacttcatcccgggtattttcaatgatatgacgaaccacggcagagccgataaagccggcaccaccggtgacaagaatcttcatactttctctcatttttcaatgacttaaataataaactctgtaataacaaaaaacgcaggcacgctaccgccattggctatcgcaaccaaaatgcgtggtgcctcagtaaattgtatttaacatgagctaagatcagcgttccgcgctgtctcatcatggtacaaaccagcccaaccgcggtaactttgcttgcttcagcgtacattcgctatcaggactttcccaaacacaacaaggtacgtcatcgagacgaaatgtgaatgtgtctttaaaacacctgacaatcatcctttcaaacgccattctgcgattggtatcatgacaaagccatgcagtcaccattatggcgagcagcatactccacagtgaatagtaccagacgaggtcgcgacgcattatagcgctggtcatgaagaataaaaatcaaaaagcggtttgaatcaattcaaggtatgaatgaaacgttttcgatacaatatcaaaaaattcaatcacttgtccacacatcattcgattacaagctatctctggtgacaaccacactaattaattcgtatttcacgaatagatataccacttcgttcggaaattcgtgatgtgttttatcgtgatagcagaatcccagggactaactgccctacaactgacattatggataagctatagacatactcaatgataaccacataaatgaatatcatttgcattaagcggcaattaagcactacagcgttactacaactcacatcctgcaactgtaaaccaagtgatcccaaccgcaagccagtgtaaaatcggcacttatgtagaacgggatatccacaccccggaggaaaaatatgaagtttttggtcactggtgccgcaggttttatcggctaccatatcgcgcagcgcctgctgaatgaagggcatgatgttgtcggaatcgacaacatgaacgactattatgacgtcagcctgaagcaggcccgtctggatcgcctggcttctccggcattccatttccagcagctggatctggccgaccgtgaaggtatggcaaagctgttcgccacagagcaatttgatcgcgtgatccacctggccgcccaggccggtgtgcgctactcgctggaaaacccgtatgcctacgcagacgctaacctgatggggtacctgaacattctggaaggctgccgtcataccaaggtaaaacacctggtgtacgcctcctccagctcggtttacggcctcaaccgtaaaatgccgttctccacccaagattccgtcgatcatccggtctccctgtatgccgccaccaagaaagctaatgagctgatggcgcacacctattctcacctgtacggcatcccgaccaccgggctgcgcttctttacagtttatggtccgtggggtcgcccggatatggcgctgttcaagttcacgaaagcgatgctggaaggaaaaagtatcgacgtttacaactacggcaaaatgaagcgcgacttcacctatatcgacgacatcgtcgaggcggtggttcgggtgcaggatgtgatcccgcaggccaatgccgactggaccgttgagagcggttccccggccaccagttccgcgccgtatcgggtatataacattggcaacagctcaccagtggaactgatggactacatcaccgccctggaagaggcgctgggaatggaagcgcagaagaatatgatgccgatccagccgggagatgtgctggacacaagcgcagacacccaaccgctgtatgacctggtgggctttaagccgcaaacgtcagtgaaggacggcgtgaagaacttcgtggactggtacaaggattactatcagatctaatccccctgccctgccgcaatcgtctgattgcggcaaccccttctatgtaacctccgttatcctgactatatgtcgacggaatgcacattcattattttttatataatattttgtgctatagacgctatttttgcctttttactcgcccgcctgaaaccagtttcatccagcctttttcagaaaagcaaatatccgcgcgccaggcactgaaacttttctggtatccagaccaatttggttagcggaaacagcattatatactgattgataaaaaacattactatctgtaggaattttcctaaatccaggatatgttagggaaagtgcgaataagcaggtcatttcttcccaagctgactcgttgattaaaatttcgcggatctgggccgatttttttcccgcaaacacatcgaatcagcctatttaggctattttttccaccatttctggcgttatttccggtttttactgagatctctcccactgacgtatcatttggtccacccgaaacaggttggccagggtgaataacatcgccagttggttatcgtttttcagcagccccttgtatctggctttcacgaagccgaactgccgcttgatgatgcgaaacgggtgctccaccctggcacggatgctggctttcatgtattcgatgttgatggccgttttgttcttgcgcggatgctgcttcaaggtttttaccttgccgggacgctcggcgatcagccagtccacatccacctcggccagctcctcgcgctgtggcgctccttggtagccggcatcggctgagacaaattgctcctctccatgcagcagattacccagctgattgaggtcatgctcgttggccgcggtggtgaccaggctgtgggtcaggccactcttggcatcgacaccaatgtgggccttcatgccaaagtgccactgattgcctttcttggtctgatgcatctccggatcgcgttgctgctctttgttcttggtagagctgggtgcctcaatgatggtggcatccaccaaagtgccttgggtcatcatgacgcctgcttcggccagccagcgattgatggtcttgaacaattgacgggccagttgatgctgctcgagcaggtggcggaaattcatgatggtggtgcgatccggcagggcgctatccagggataatcgggcaaacaggcgcatggaggcgatttcgtacagggcatcttccatggcaccgtcgctcaggttgtaccaatgctgcatgcagtgaatacgcagcatggtctccagcggatagggccgtcggccattgcccgccttgggataaaacggctcgatgacagcggtcatattctgccatggcagaatctgctccatgcgggagaggaaaatctcttttcgggtctgacggcgcttagtgctgaattcactatcggcgaaggtgagttgatggctcatgatgtccctctgggatgcgctccggatgaatatgatgatctcatatcaggaacttgttcgcaccttccttagagtaagccatgcaacagcacaaaactggtgtattgcttatcaaactaataattcaatcaacatacgccctgtggtagatattatggaaaacctatttttcttagtggtcgctgccatactacttgctgtttccgtttatttcttaatttcttatttaaaagacagaaagaaaacgaaactgacgtttaataaacgcaagtagtaaggcccgcttcatattgcaattagattaagataatattaagagataaaaaaatgatatgacagaatgactattcattctgcgttttggcatggccttaaggcaaaaaaaaaataacgctactcgcgccctatcccgcgttttttcataggacataaataacaaaagcctgcgttgcaggctttgttttacctcccggcgcttatctccggcatctacatcacagtgacggtagctcttcacaaggtaagtttaacttatcggacctgttttcaacccgcaacggcttttgagcaggatcgtaatgtccatcacaatttattggggttaatctgaatgagcggaaaataggctcggggaaggagaaatgaggaagggataaaggaacacactggcggcggcaggccgccagtgacagacaaacaggattaatcgttgccaaacagatcgcgggtataaaccttatctgcgacatccgccagctcttccgccatacggttagagatgatcacatccgcctcttgtttgaaggcatccaggtcgcgcacgacgcgggagttgaagaactcatcttcctgcatcaccggttcatagataataaccggaatacctttcgccttgatgcgcttcataatgccctgaatagaagaggcacggaagttgtccgaaccactcttcatgatcaggcgatacacacccaccactttcggcttacgagcgagaatagaatccgcgataaagtctttacgggtacggttggcatcgacgatagccgcgatgatattgttcgggaccgattcgtagttcgccagcagctgcttggtatctttcggcaggcagtagccgccgtagccaaaggacgggttgttataatggttgccgatacgcggatccaggcataccccttcgataatctgcttgctgttcagcccctggctttcagcatagctgtcaagctcgttgaaataggcaacgcgcagcgccagataggtgttagcgaacagtttgatcgcttccgcttcggtggagtcggtaaacagggttgggatatcctgcttgatcgcgccttctttcagcagatcagcaaaacgttcggcacgcgcagagcgctcaccgatgacaatacgcgacgggtgcaggttgtcgtacagcgcacggccttcacgcaggaactcaggagagaaaataacattatcaatccctaaacgttctttaatgtcgcgggtgaaccccaccgggatggtcgatttaatgatcattaccgcgttcgggttgatctctgtgacatcgcgaataaccgcttccaccgtagaggtgttgaagtagttagttttgggatcataatcggtcggcgtcgcaatgatcacgtagtcggcattacgataggcgtcgtgcttgtccgtggtagcacggaaatttaacggtttttctgccagatattcctgaatctctttatcgacaatcggagagatcttctggttaagcatatccactttggcctgtacgatatccagggccaccacttcgtggttttgcgcaatcaggacaccgttcgataaaccaacataacctgtaccggaaatagtaattttcattcgattacactttaatcagttaactgggtaatggcggcaagccacgaatttaaataatgctgtgcgcggttttacgctgagaaggaaggtaagtcaagtcggtcggttgaccaagcttgtaaacgaataaacatgacgagttccatttggaacccgccattttaggaaaaacaacctaattatttataaacttctgcagtggccagagtatgtgcctgcagatctttctccgacagcgacagcgcgcagtcgctcagcgccggccagtcaatccctatctccggatcgttccagatgatgctccgctctgactgtggcgcgtagtagttcgtcgccttgtagacaaactgcaccgtgtcgctcagcgccataaacccgtgggcgaacccttccgggatccacagctgacgtttattctctgcgctgagcaccgcgcccacccatttgccaaaggttggcgatgaacgacggatatccaccgccacgtcaaatacctcaccttccacgcagcggaccagtttgccctgagcgtgcggatccagctgatagtgcagcccgcgcaatacgcctttctgggactgggagtggttgtcctggacgaattccacctggcggcccacagcctcattaaacaccttgctgctgaagctctcaaagaagaaaccccgcgcatcaccaaacacgcgcggttcaaaaatcagcacctcaggaatatctgttttaataatgttcatcttttgctacccgtttatttacccaggacttctgttaccacgcgagccacaccctgacgccagtccgggagagtcaccccaaatgcctgctggaatttttcattcgacaggcgagagttgagtggacgtttcgccggcgtcggataggccgtcgtcgggatgcccttcacttcctgaaccgccagctctgcaccgtgcgctctcgccacctcaaacacatagcgggcgtagtcgcaccagctggtctcgccgctggccaccagatgataggtaccggccagcgccggatcacgcagcgtttcacggattgccgtcgccgtgcagtctgccagcagctctgcgccggtgggggccccgtgctggtcgtcaatgatggagagcgtctctttctcacccgccaggcggagcatggttttggcaaagttggcgccgcgggtggcatacacccagctggtacggaaaatcaggtgacgcgggttgccgtgctccagcgccagttcaccggcacgtttggtttcaccgtagacgttcagcgggccggttgcctcatcttcccggcgataatggctgccggcgccgtcgaacacatagtccgtggaatagtgcaccatcagggcacccagcttcgccgactccgccgccagcaccgccacccctttgtcgttcagcaggtcggagagctcccgctcgctttcggccttgtctactgccgtgtgcgcggcggcattcaccaccacgtccgggcggacggtacgcacggtctgcgcgataccgtccagattagtcagatcgccgcacagctctttatcaaagtaatccaccgcgaccacatcaccgagcgtggacagggagcgctgcagctcccagcccacctgaccattcttgccaatcagtaatatcttcatcttgttattttcctttaatggccgtgcggcttcagtcttcactgagcagacgtttcaggtaggcaccgtactcggttttcttcagacgctccgcctgagccgccaccccttccgccgacagccactgattacggtaggctatctcttccagacaggcgaccttcatcccctggcgcttctcaatggtatgaataaactgagaagcttcaatcaggctgtcatgggtgcccgtatccagccaggcaaatccgcgccccagcagttccacctgcaaatcgccgcgctccagatacatctggttcagggtggtgatctccagctcgccgcgttcagaaggcttgacgtccttcgccatctccaccacattgttgtcgtagaagtagagcccggtcaccgcccagtccgatttcggcttcagcggtttctcctcgatggacagcgccttaaagttatcgtcgaactccaccaccccgaaacgctccggatccagcacctgataaccaaacaccgtggcaccggaggtcttcgccgccgccgcttccagttttttaccgaagctctggccaaagtagatattatcccccagcaccagggcgcaggcatcgttgccgatgaacttctcaccaatgataaaggcctgcgccaggccgtccggcgacggctggatggcgtagctgaagttcaccccgaactgcgacccgtcacccagcaggcgctggaaggaaggcatgtcgtccggggtggagatgatcaggatgtcgcgaatgcccgccagcatcaggacggacaccgggtagaaaatcatcggcttgtcatagattggcagcagctgcttggagacgccctgagtgatcggatataaacgcgtgccggagccgccggccagaataatacctttcatctttacttcctttttagttattcaggccaaggcgctcaccggcataggagccgtccagcacgcgctgccaccaggtctggttgttcagataccagtgcacggttttttcaatcccgctctcgaacgtctcctgcggcacccagcccagatcgcgctgaattttcgcggcatcaatggcgtagcgcaggtcgtgccccggacggtcggtgacaaaagtgatcaggtcagcaaagtgggtgatgttgcccggcttctgcgccaccaccttgtcgagaatggcgcagatggtgcgcaccacatcgatatttttacgctcgttatgaccgccgatattgtaggtctcgccgctcttgccttcggtcgccactttgtacagcgcacgggcatgatcctcgacatacagccagtcacggatctgctccccgttgccatataccggcagcggtttacccgccagggcgttgaggatggtcagcgggatcagtttctccgggaagtgatacggaccatagttgttggagcagttggttaccaccaccggcaggccgtaggtgcggttccaggcgcgaaccagatggtcgctgcccgctttggaggccgagtacgggctgctcggcgcgtacggggtttcttcggtgaacaggtcatcggtgccatgcaggtcgccgtacacctcatcggtggagatgtggtggaagcggaaggcctgcttctgcgcttccccaaggccggaccagtagtgacgggccgcttccagcagagtgaaggtgccgatcacgttggtctggatgaaggcggccgggccatcaatggaacggtccacatggctttctgccgccaggtgcatcacgatatccgggcggaactcgctgaactgggccgccacggcagcagaatccgtgatatcggtctgggaaaacgagtagcgttcgctcccggccaccggcgccagggattcgaggttgccggcgtaggtcaggcagtccagcacgcggacttcatcccgggtattttcaatgatatgacgaaccacggcagagccgataaagcctgcaccaccggtgacaagaatcttcatattttatttacctttgattactcatgcaaaaagaaaataattgcatacatctccagattaaaatgtttgagatgtaattttatggggataatatcgaaggaacactataaaaacaaatagcgaaactcttaatttcccgctatttgtcagaatagaacttgattatatatgtactttaacatcagacccccaataaattattggaggcctaataagataaatattaatctaaccactcagtgtggaaaatgccttctttatcagtgcgcttataggtgtgcgcaccaaagtaatcacgctgagcctgaatcaggttagcgggcagaacagcggaacggtagctgtcatagtaggcgattgcggctgagaacgttggtaccggaataccattctgcacggcataagccacgacatcacgtagcgcctgctgatagtcatcagcgatctgtttgaagtacggcgccagcaggaggttagcaatgccagcgttttgcgcataagcatcggtgatcttctgcaggaactgtgcacgaatgatgcagccagcgcggaaaatcttagcgatctcgccgtagtttagatcccagttgtactcgtcagaagcagcacgcagctgggagaagccctgagcataggaaacgattttaccgaggtacaacgcgcgacgcactttttcgataaattcagctttatcaccagccggctgagcctgcgggccactcagcactttcgaagcagctacacgctggtctttaagcgaagagatgtaacgagcaaatacggactcggtgattagagacagaggttcgccgagatccagtgagctctggctggtccacttaccggtacctttgtttgcagcttcatcaagaatgacatcaacgaggtatttaccttcttcatccttcttggtgaagatatctttggtaatgtcgatcaggtaactgctcagttcaccttcgttccattcggtgaaggtttgcgccagctcttcgtttgaaagagccagaccgcctttcaacagcgcataagcttcagcaattagctgcatgtcgccatactcgatgccgttatgaaccatcttcacataatggccagcaccgtcagcaccgatataggtcacacatggctcaccgtcttcagcaactgcagcaatctgcttgagaattggagcaaccagctcataagcttctttctggccaccaggcataatggaaggccctttcagagccccctcttcaccaccggaaacaccggtaccaataaagttaaaaccttcggcagacagttcacggttacgacggatggtgtcctggaagaaggtgttaccgccatcaatgattatgtcacctttgtcgaggtaaggcttcagggaatcgatggcgctgtcggtgccagccccggccttcaccatcaacaggatacgacgtggtgtttcgagggattcaacaaactcttgtactgtgtaataagggaccagtttcttgcctggattttcggcaatcacttcttcggtcttttcacgggagcggttgaaaacggagacggtataaccacggctttcgatattcagcgctaggttacgccccatcacagccataccgacaactccgatctgttgcttggacattacatactcctgtaggtgaatcaaacaatatcacattaataactgaccttgaccagttaactagttatactataatttttgattaaaagtataacaaaaatgtgtaattagctttcattaaacttaaaaactatttaatcaaaaaaaaaccataaccaaatcatagttggattaaaaatgaactgttgtgaacgacaatcattttttaatctttgatagcacaaattttctaagagttgcggaaagagtgagagagactaataaataaacaacggcgccagaaaaggataatagtactaaaatattaaggctcgcaatagcattggggaaaaagaaataatcgatgagttttaagtaacttaacatgactaatgtagccaaaacaattgaatagttttttttaaaaaaaacattgagactctcccctaacaaactcattaaagaccacatgacagggaaaaaattaataacattagcgagaagataacacatagcaaatgtagttattgtatattgaacacctatgatgaaagctcccacttgcaagatcattccaataatgcctagctttaataaaatgtctgtacgacctttagccataaaaactgaaccagaagtactaagtaccgcttgtataattgctgttggcgctaaccattttaatactattcccgtaagataccattcatcaccgaatatcaatcggataaaaggctcactataaaatgccagtccagacatcaatggacatgttataaacaacacaacatagacacaatttaaatatatttttgatatatgctgattattactttgttgtttacttaatattggataaagtgacctagttgcgacaaaggtaagactttgcaatgggaaaagcataattctataagcaagattataactcccgagaattgaagcagacatgaatttaccaataataaagctatctgcgttccttgaaaaataatttataaaattaaacattgataaatttgcactaaaactgaaaatacttttcaaatccttataattaataaaaaccctaatagaaggtttccaatttgatgcaagccagaattgtatagcagacatcagattaagtattaaagcttgaccaacaagactgaaaacaccaaaccccatatttgctaaagtaatcgctagtactaatgaaacaagtgaagaagaaatttctatcctggagactgttttgaatttcgagtctctctcaagcaaagcaaggtgagctgccgcacagctcgaaagaggaaatgtaaaactaagcaacatcaatactaaagttaatttaggctgatgatagatactggatatcacactcgagcccgaaaaaaccagaacaaataaagtcaatcccatgaggagatttaaccaaaaaacagtattaattagagactcagtaaggtctttcctttgtattaatgcagcagaagtgcctaaatctcgtaacaggatacctaagttcacaacaacaagagccatagccattaaaccatattcgcttggaggaataatttttgctaaatagacgatgtttgttagttgcactaacattttgataaattgtgatgccatgttccatttagcatttgaaagcaatgtcatatcaggcgagcctttgagtatgcactaaggatatatgagtttatgaagttatgattagtatgagagatgttaatatatcaaattaatgacttcggggatgatgccctttaataaaagttaaagtaagcaacttcaaattgttaaacctacagcttattatctctctaagaaaacatcttgtcattcccaaaaccatatgaataccagatttagaataaaagcgacacgaaattgcataatcatataaatgttcacgatgccgccattcggagaaggatgtatttgtttttgaaagagagtgttccaatgtgctaaagatttggacccgaatatcatactgtttttttatcctttgaatcctacgaaaaaaactgtaatcgactccgtagagagcataacgctcatcaaaaagttttagattatctttcctgaaacattcaacaagacttttataaataactaacccagacccaattgaaataattttatcattgacattaaaagtatatggaatgtctgcattatacactttatcattacataatggataatgtattaattttcgttccgaatcaataattctagggatttgtaacatcacatcgacattatagtaattttgcatatcttgaaaaaaaagatcagatatatttgtatcatcatcaaataatataaagcgatcgtactcattgtaattatttattattgtgttataaatcacagccaaggatctattttcaagatattcgagatacgtcacacttgtaaatttacttttcaattcataatataaagaatcaaatttaatttcattaggcccattattgataatgactagatgggtattatttagagtaatatgtagtaaattatttaacgttaaagatgatgagaattctttgttatataaaacaactgcaataatattattcacgaatcactccatcaaggttattagagtcataaatataattcaattttttattattgaagaataaaactgccatgggaatctgtgctaatacattgagattgaaatatccatttccaaaaattaagagcaaatttatctggctaataacagagaaaagcaaaattgctgattttttcttttttacacgattaaatacataagatgagattaggccatgtacaaagctaaaaacaaccattccaagtattccctgggataggaaaatttcaatatatccacttccaacattaaacgcaccacttatttgataagatctagcaaatgcatcttcatctgttacaacacattctaatgcccctcgcgcaacttttggcaaaaggctgcataagaagttaaggtttgtatctgtttgtcccatgtgaatagcattagttaaatttactattggcgttacaatgtaaatgtacgcccacatgaacccacttggcatccagtcgggatattcaaaacttggatgagccaattgtataaatagttgtctgccagttctaatatcaccaatatatccaaacaatagaaacactaacaaaacagacaaaacaactaaaaaaattgtttttggcctaatttttgttgtgattagatgtatcattcctaattgtataaaggataccataatcatttttctagtaacgagcagaacaaaaatagaaataataaaaaaagtgaaccataatgattttttatttttaaaacatatataatcataataattagatgcaaccaaaagacaaccaaatgcaagaacaaaaccatgcaatgatggaatcccaaatgcgaattgggaaactgtgcgtcctgtagccattgatattaatggtatataaccagcaattgcaatttcaactaatacgagagcaaaaaaaatgaaagtcaaatttctcgttttccttaaaacctttgcagctccagtattgaaatcaacaacgctatacttcacatctattttcttcttaggtgccaacttatttattgaagtaaagagagaatacccaaccaagaaaggcacaataatgattgttactgtaaccgcaatttcactaataggaaatatcaataaatctgataaacttagagtatagaggataaaaacaccaaaccatataaagcaaaacgtaaataatggtgatgttaattttcccttgtgtattgaaaaattttttatagcattcaatatagccatctcagtctctcttcaatagactaacaatctttctaagttgtaatgagaataaaaacctatacatggaagatttattatttaaataaatcgatcgatgtttatcgaatatatactctcgtgctgcaataccctttttaaaacctttagatattgagtcagaggattcaatgcataaagctaaaggttccgatatatagaagccttgagatttacatgctattcttaatgcaaattcccaatcttggaatctttttaaatgaatatcaaaatatccacaatcaattaatgtatttttttttgaaattaagcattgagtgctgatcatattattggctaacattttttttagaaaatcgtttttgatagcaccggatgcagaatgataaaccccacctattattgattttagtccaataacacgaataaaaggatgaaaaatgtaatctatattaccgttatttgaattaatagctccctctatataattaagtttatcaattctccaaaagtcatcactatcgttaaaagcaacccactcattcgttgcagcttctattcctatatttctagcattgcatgccccggttcttccattagtatgcaaaacttttatattcaaaccttttaatctatcaatagacccatctgtagaaccatcatcaactacgataacctcgatattatgattaccaacttggtttaaaacagaaagcacagccccttgaatgctagcttcacggttataacagggaataatgacactgatatccattaacgacaccttaaatttgatttaaaataatttaaattttttgaaagttattcttaatatagatatttgaaacatctttacccatcttcaaagactctctttgtctaaccaacgataatctagttggttcaataattaagtttttctgaaactctacgcttaaatttattttattgtcagtagaatttaaagtaggagagttgaaataaagataattaccatctccttgtgaataattaacccctttttcaggatctattgttcccgcagtaaatttacagtaataactcttgtccgaaaaatctccggttaaacgtccatcaaattcaagccttaatacattgtctataccacctctagtaacagcgctcatacatttagcagtcacatcacatcttactaaatccttaatttctaacatgtagtttgatacattgaaatttttaaaataacagtcaactgacccctgaagaaacacatcagccccgacgatcgagtcaatgactgaacgtcgtagaccataaaaccatactccacgtttgaaatgtgaccttggacgctcacaaataacattattaacaattatattatcgttccagcaggaatatggtgtgtataaagaatcgacaaatagggaataattactttgtttttttgaggatgaatttgaatcacttattgtaatattcgataaaataatctgaggtgaactcatgatttttaaggttgaattatcactgttactttcagaattagaaatttgtaggttctgaaaaatacttttcccgaaacaataagttatgttgactgtagacggttcgccaagaccagttaaagttaaattactaacgttgactccatagcagttagatataataaggcggttaataaataaagaagaaagctttacgtctttaatattccttaaaacaagtttttttatgcgcccttctcctgttaaattaacatgttttataaaattggtctttattaaccacggattagagtgagaatatacagttcgggcactcaaaatgatatgagagttattaacgcttttgacttcaacatattcgaaataatacttaccgccaccaacactatctgtaccgtctacattttcgatacgaataacatctccggggctaaatttatttatgaagtcaccattaattgtatatgactcttttggtatttcgcctttaaaagcgataacgcttttaagtttacttatgattgggtaactatatggaaatctagttccatttttaactataaaagcagtttcattaacatcaacaacattcagaatatctatgccattttcattaccaatttgagcactaccaccatgccgataatctaatgaaactgaaaccatatcacctttattcattttagagtttttattagaaaaagagcgagttccgcgagaaaaagctttccaatcttgatttattataaattcgctttcagaataaaagagcccaccaataatagaaagctcaaaatttaagcaacacccattttgtaaaacaattcttatagggaaatcaatagaaatatcttcgctgtaatattgaccttttaaaaaagtacaacttaatccattaatataagcatattgtagggctttttcaatagcctctttattattgaaaacaccatcagattttgcaccaaacatttcaggtgttactgagtctgtattaatttggcatccaaggttttcaggatgagatttaaaaccttctttaccttttgaaggaatgcttataaccaaaggtgataatgccatgcttctaagcaaatctctacgtctcattttaccctcactcgaatcacaaaattgggcgtttgttatatcattttatttaaagattggaaaataagaaatgtttcaaactcacatattagtattactatataatattttttagtgccccataacttaagggccatgaactatagaaataatacttttcgcaaccgagaggacatattgacacaggcatttacaaaaagataaataccataattagtattagtcaatgatagtactaacgaatgatatttatcaaattgaactagttataaacaatttaaagcagaacactatgaaaaataaaagttagtaatttgcttcacatgttacaaggcaaaaaaaacaatgagttgaatgctttacagctcaactcatttatcttcactcgagtccgtaatataaaagagtaagatttttaatatgtgattttatagattactttaatgcccccagaatctcttatgcatactgaattttttaatcaaaaaccttggtaagaactgataacttttacctgccttgaaacctataaatttcataacattatataaaaatgaggcgggtatccagtgtggataattttttagcaaaaatttgaattctgaaataataaaacgcttgccctcaccacctgcacctccaaaactattcctaatccaaggttcatccgtatggaatacacctatgtcaaaatagcgtttaaactcttctgatggagaataattatgagaatgatgtacttttgcttcgggcacataagctactttgtatcctgccaatattgcttttgccgtgtaaaacatatcttcacataatattgtattcgacgggaagccgcctatttttttaaatacagataatctataggctgaaaaagaattagacataaatgctgttttcaaccccatcttaggtatgctacttttagacgcaatataccctttatctggataattaaatgctctggcatgttgtgccaatggattagcatcagtatgtggtaactgccttccataggcacatacaatttcttcatcttgaaaaacagttattatgctttcaataaatcccggttcaggtatagcatcttgtgtgaggaatatgactacatcgtaatcctcaatatattgattaattgcttcgttacgagttccaccatgattaaaatctgagctttgaatagatgtcacatcaaaaccattaattaaagctacggtggctgtatcatccttactaccagaatcgattacgtgtaccaatgtatttgcaggcgtattttttttaatattatcgacggtagtacgccacaaatccccaccattataagttggtatggcaatatagtatttcattgatagattatcccgactgttatataaaggctggaagttaatacgcaccgtctctttttaatacaacacccacagttttaaataaaatcgcgatatcattccacattgaccaatttttaacgtaccaagcatcaagataaacacgtgtctcataatccacatcactacgcccactaacttgccataggcctgtcattcctggtttgctcaataaataataatcaacttcttcattgtatctttctaactcagcagtaatgataggccttggtccaactaaactcatttctccttttaatacattaaataactgcggcaattcatccaggcttgtccttctaaggaaaccgcctatcttagttattcttgggtcgtttttcaatttgaatgttaaattccattcttctcgcgcatttatatcattatttagaagttcttcaagaacttctttggaattgattaccatagatctgaacttcaaacacttaaaggttttacctcctttcccgatcctttcatgaccatatattgccgggcctccatcttttttaactttaagacttatatataataatactggtgaaagaagagtaataatagacaatgagcctataatatcaaaaagtcttttgagaattcttgacgaccattttgctagattttgctgtacacgaaaaatcataacttcatgactgaatatgaatgacatatctgtgctatcaagaggcattccacgcaatgttggaataactgagacatatcgatagcctttaatcataaagtttctaagccacgcgtttcttattttactttgatgagactctacagcaacaatgaattgtgttttgggatcaatatcattaagccattctagattattttcaatcactggtataccatcaattgcctctcctgatggaactccgccaggacttgatatgaaaccgacaatgtttaaacctaagtttttttctccgctaattgctttatatgcttcatgagcattttcactactacctactatccaggtatctctttgccacatccccgctttattcaataaggtctttgttaccattcttgacaatggaacaagtatgattacaaataaccacgttatcacccataagtaacgtgagaatgaccaagtggtaaaagccataacagcaatttcgattattgcaaaaataaccaaggttcgaagtatttctttaagttcaaaccaaaatgttttacggtaaaaataatgccttagtctaactgaataccagcctacacaacaaacaccgagaatccaatgaagtaaaaaccatccatctatttcattagttaataataaataatcattcttttccacaattaatgataacacgcccaatgctatgtataaagaaagaatgaatgaaatgaaatctgataaagccaatgtgacgctaactatgacattcttgacgagaagcctcatgaaatcctctcaaaattaataaaatatatattattacactaatataaatttttctttccattaccccaaatatcaataaagataattggggtaagcattcaattagtgcttatccttgtcattatatgagtaaccataattattataaccataaccataataactactagctttcttcaccacgccgtttaagatgcaaccttttactattacaccactattttcaaaacgtttcgcactaatttcaatttctttggctgtgtttttttcaaaccttgcgacaagcaaggttgtccctgcataatgcccaataattgccggatcagtgacagccaaaataggtggagtatcaagaatcacaatatcatattttttttctgcccatgctaaaagctctccaaaacgtctgtgcataagtaattcggccgggttaggtggaacctgtccacgagaaatgaaatcgaaaccagcgctatgtacttttttcactgcttgggatacttcaactttccctgacaatatttcagaaaggccgttattgttatctaactcaaagagcttttgcgcatatcctttcctcatatctgtatcaatatatagaacagattttccagtttgtgctattactgctgataagtttgaacttacaaaagtcttacctgcattagggcttgcacctgatatcattaaaatattgtttctagcctccatcattgcaaagtgcaggcttgtgcgtaatcctctaatcgcttcaattgcaatatcagcaggattttcaatcgcaagaaaagtttgaggctcggattgttctttccttcttaaaccctctagtttagtagctttctgggtaagtaactcagaaataggaatgcttgcataaacatttatacccaactcttcgagttgctcaggtgtttctattcctcttcgcagaaatacacgtaataagacaataccaattgatatcagaaagccaagaacaaaaccgcctatgacaaccagaatttttttcggttttacgggttcaggttgtgttactgcattatcaataattctaacattaccaattgcacttgatttcgctatattcagttcttgttgcctgttaagtaacatcatgaagacagcacgcccagattcgacatcacgatttagacgtaatatttcctgttgtgttgccggcatggctgacacttttttattaagctttaacttttcatcttgtaaggtttttcttttttcaagtaaggccttataggtaggatgttctttggtataaagttgtgatatttctgactctctaaaagtcagttggtttaattggttgtctacatttactatttggtcaagtacagatttggcttctaaggataaatcaaccgaatcattctgccttcgatactgattaagtttgctttcagcgttatctaaatcacttctaacaattggtaattgctcattcaagaatgctaaactctttgcatcttgcgctgcttgccttgcgatattttgtgcaaggtaattctcactaatactattgatgatttctttaatttgttttggattttctcctgtaagagtcaagtttaaaatacccgtatctttgccttgttctgaaatattgaacttcttctgtaacgcacttattgcatccaatttagaagtataatatacagtaaaactagtacctggctcagcgtctattttatcaattttaattgtgatatcatttttatttactaactttccaatgctagcattgaacttttcatcattatattctaccgtatagctattattatcattagttgttattttaattttcgggatttcatcatggctacctgttatatataaccgtctgacagttaaattgcctggtttgtcccctagcaacctagccaacccccgaccaaaaacagggaaataatcttgcttaataactgcctgtaagtttagatcatctaccgttttccccaaaatcattctcgattgtaataatgctatttcaggtgcagattgcggctgactatccggaagtatttggctaagattatttaaaatgctattaccctgtttttgctccacttgaatcaacgcatccgcctgatacactggtgttgaaaaaatggaataaatcaatgcaataacggtaaatagagacgttactgatattatcaatttgcgatggtcaatcaattcaccgattaagcgaccaaaatcgatttcatcagattcctgagatgcttgtttattaataactggtgacattaaaatattcctgattattttgtgcctagtttttcagcccaccgctcaccggccaattctattaaattatatactgatacaaatgcttcttcacttttcctatatggatctgggatatctcgctggttgcaccagtgaccataaagcattgttttccctctggcctcgggtgagatgcgcccgatttgctctatatgggccttttccattactaatataagatcgtacttgcgccccatggacgctgagtattgtttcgctacatgattttcgagcgaaagattatgcaatgatgcgattttacaagcattcaaatcggcgccataaccaaccattgcattcgtaccagccgaatcaatcacttttgagggaagcaattttcgtaaaagccgttctcctattggagaacgacaaatattgcccgtacaaataactaaaattgattcaaacattttatggccaagtcctaatatatcttacagtttctgtcatatcatgtactccagtaatggtaggtacaagttgggaaattacacgattccaacgtactaatggagccgatgtgacatagacgatatcataaggttgtaattcgaattctgttccaagaaccatcgcggatgcatcttgcgcgttcaactgatagatattagcaattttaccttgtttatcacctttcagttggcgaataacgaagactcccgtggcatcactgtacgcttgagacatgccttccgcattcccgattgcctctgctaatgtcattccactacgatccatcttcaatgtgctctgcttgccaacctcacccatgacaaacactttaagatcgtcattccttggtacaaagagaatatctccaggatataacatatgattttgtgttaaatcccctttttgcattaatgcataaagtgatacttttgtatctttaccattatgagtcagcacaacattacgccaatctgcgtctggtgccagcccaccggcggcatttattgcatccataactgttaaaggaatattggtaataggttgctggcctgattttgtcacttcgcctgtcacgtaaaccttttgagaacgaaacgcagcaacgctaacatcaacctgtgggctttcaatataggtggtcaatcggctggctatatcctggcgtacctggctaagcgttttgcccgctacctgcaccttaccgatataaggatagaaaatggtgccgtcggaattgacccagttgccggtgtcgctggcgctacggtattgccctgcaggcgttgtcagctccgggtgatcccataccgtaaccatcaatacatcgcccacaccaatgcgatattcatagcttcggagcaaattatctaattgtgggttaggtctcgccagaacggtctctggacgaagctgatcgataagcccaggagtcatagggtacacattgaccagtttatccagatcgtagtcgctgtccggtagctcaaccacgtttttccgcagactgtttaatccctgaccagggataatggtacaacccgataaaaacccaattgccaacgctaatgccgaaaatctaacaatttttttcttcataatgtcacatcatcagtaaatcaaaatttgccaattcctgagcagctgtcatcgccgttacttccctgccggcttgtggagagaaaaaagctgactgcgtcctgcagcgctaccaccttctctcccatgttttcagcattcagccttataaactaaacggtatttctatccctgcgcttgccccaacgtcatcgctgtcgctgttgttagcgttggtgtaccacaatgaagtattcagacgaacagactgatacacatctccgctccagcccagctgtacacctttcagagtatccgcatgagggaacgctttgttgatcgactgattctccgggttaactttggcgtaaaccaggcgcgtactccagcgctggttatcctccgtaataagctcaaccttaccagcaacgagttggccatccccgcccattgagtcacccagcggatagccctgctgatagtagccatccttatagatatgatgggtataactgtaattggttcggctcatattggttcgcgtgtcatgcgcttctacgtaccagttcaccgcatctttaccccaaccgtggtgcccttccactccaccaaggaacatattcgcggaaggcaggtagccagactcatcctcgccgaccatttgcccatagaaactcaccggccaacccagagtcggctcgagtttgaatttaaagtcaaatccggccagctggttacccggttcgttatctgtcccggtattatcttttccagtaaaaccatcccagaaactgctgaacgattcagggcgtccttccccaccccactgcataatgcgcgaagcacctaattccagtgactggaacggcgtaaaggtaaagcgcccgccgataattttagtgtgcggcaccgcagtatattgattcatctggctggcggagatctggtactgccatggccccacccagcgtaaccaccaggtctctggagcagcctgctctgcgcgctgcatcaggaaaccggtcatcggccgcatcgcatccccgcggatcaggctaccttcatagcccggtccccaccactgtggtacctggccaaaggagagccactggttccagaacttcaccgcgccgtaggcgccgttggcattgaagcgagatccgttgctgatccgctctccaccttcaacgttgccctgcaggtggacatcccaccactcaccgctgttgttgaacgccaggcctaacgaattatccgccggctgcgtctggccaaacccctgcggagtgcccggctgatcggttgaagtgtagccggtgacccggaaatccgcttttaaggcagacagtctctggttgatacgggccagaactacctgctcagaagaataggacggtttggcctttttcagcgcccgggcaatctcttcctggctcagcggccaggtcgacaggctcagatggatgaccccgcgatcggaaagccaggccaggtcgttacgcaagtcgttgtcatttaccactaacccggctgcgtaagcctgggctcccagggaggaaagcaaacccaacgtcacggcaatgcgcgcaatttttatcattgtacaagatccattttcagccccgctgtcgtatctcaatgagaatgaggggaataccaagatagaaagcgctcgcggcaccagctgacttcgctgtgcaacaccggcgaggcaagtacatttaccctaagctgcttgttagcctaataacatccactcagctcacaatgtaggtgaattttaccctacaggctatggatgagacaggaaagttaatgtccaggcgatatcagcagccgctcctggccaacttctgaggatatccgtagaaaattgatagatatctattgatgatgatcatcctgaccgggtcgatatttacagccgttgaagagaacctctgtgcagcagcaagcggcttcagcgacgctaccgcccctggcttaacagctaccagcgcactgactacctgaacgacttaatttttatcgacctgtggatgaataattggtcaggccattatttttggcggcgttaagtttacgggatttcggtcacaattgggagtgttgttaccgaatatctgccaattaatgccgcctgtcgttctactgacaaaaaataagcgggtcaccaattaagattattcactgatttccaggcttagggaaagtgcgaataagcaggtcatttcttcccaagctgactcgttgattaaaatttcgcggatctgggccgatttttttcccgcaaacacatcgaatcagcctatttaggctattttttccaccatttctggcgttatttccggtttttactgagatctctcccactgacgtatcatttggtccacccgaaacaggttggccagggtgaataacatcgccagttggttatcgtttttcagcagccccttgtatctggctttcacgaagccgaactgccgcttgatgatgcgaaacgggtgctccaccctggcacggatgctggctttcatgtattcgatgttgatggccgttttgttcttgcgcggatgctgcttcaaggtttttaccttgccgggacgctcggcgatcagccagtccacatccacctcggccagctcctcgcgctgtggcgctccttggtagccggcatcggctgagacaaattgctcctctccatgcagcagattacccagctgattgaggtcatgctcgttggccgcggtggtgaccaggctgtgggtcaggccactcttggcatcgacaccaatgtgggccttcatgccaaagtgccactgattgcctttcttggtctgatgcatctccggatcgcgttgctgctctttgttcttggtagagctgggtgcctcaatgatggtggcatccaccaaagtgccttgggtcatcatgacgcctgcttcggccagccagcgattgatggtcttgaacaattgacgggccagttgatgctgctcgagcaggtggcggaaattcatgatggtggtgcgatccggcagggcgctatccagggataatcgggcaaacaggcgcatggaggcgatttcgtacagggcatcttccatggcaccgtcgctcaggttgtaccaatgctgcatgcagtgaatacgcagcatggtctccagcggatagggccgtcggccattgcccgccttgggataaaacggctcgatgacagcggtcatattctgccatggcagaatctgctccatgcgggagaggaaaatctcttttcgggtctgacggcgcttagtgctgaattcactatcggcgaaggtgagttgatggctcatgatgtccctctgggatgcgctccggatgaatatgatgatctcatatcaggaacttgttcgcaccttccttagaaatcttcccggtaatgctacaacatcacaaatgcagctaactaactgtaaaaaaacgtctttttccatagctcaccatcatgcaaaaatcagatgatggcgttatagtcaactacaatttctaatagtttcctgtgtctggatattcattgaatgtgcatcaggtaacgtctcagcgcatttaagaaacgtctgatcaaggctatatccaggcaaatatgcaataacaatgtagtagcacttcattatttcataaatatgaattatcaattaccgggtatatagtagattattttcttatttgtctaattatccggcgaaaacttaatttcccctgtaaaacaaatggcgattaccaggcctgcttgtgcagatcggtacgcgtaaagggtttatccagcggcccactgcggtggcgatttgtcccagcagggactgagtcggcgctttgctgccgctatgtaaaaggataagcggaaccatcaccaggcatgcaacaccgccccatgagatattcacgttctccggatcaggggtacgtttttgcaacaccaggaacaaagcgctgccagcagcgcccagcagcaggccggcaatcacttccgagacggaatgcgcatggatgaccagccgcgaatagcccaccacggcggccagaacatagccggtaataacggccgctttacgcagaccgacggagaaacgggcgctgagcagccacaggaagataggccagaaggccgcggagagcgcggagtggccgctgaagccggtgaaatccagttcacgaatacccagaccccagcccataaaggccagtttagaggcgcagacgatagcgccggtgatgccgaacagcaaactccactgccacgccagcaaccgcgacgttttacgcagcatcaggacaataaacagcgccgctgcgctgggcagcaaaacggtgctatcgccaaaaaatgagatgagttgccagttcatatacctgtgatccttcgatgatgtccactgccgtgctcagggattatccgtaatgtctgtaccagctcgcatgccaattcatttcacatttttatgcatgcaagtgagatgtttaaagcggaaacatgatcgcagtcaagttttatttttggctgacgttgaccgctttccctgcgctttaggaattgtcgcactaagtgactattcataaagcattattgccgctactccgaccattgcaccacagaggccagagacaaactaccagaagtctccgaagccatacgtttctttacaatcgttataacattcacgttatgaataatttctgcataacgttatgagcggcgtgccgaaaggctctgccctgccgctcatctttacgccagctgtcaggccagcagttttttaatgctttcgcggaatttggcgccttctttcaggttacgcattccgtaggtaacgaaggcttgcatgtagcccattttcttcccgcagtcatagctttcgccggtcatcagcatcgcgtcgacggactgcttcttcgccagttcggcaatggcgtcggtcagctggatacggccccatgcgcccggctcggtacgttccagttcggcccagatatccgccgacagcacgtagcgccccaccgccatcagatcggagtccagagtctgcggttcgtccggtttttcaataaactcgacgatacgcgccacctggccttcagccaccatcggctctttggtctggatgacggagtattcggagagatcgcccggcatgcgtttcgccagcacctggctgcggccggtctcgttaaagcgggcgatcatagcggcgaggttatagcgcagcgggtcagcggtgccgccgtcaaggatgatatccggcaggaccaccacaaacgggttgtcgccgactaccgggcgggcgcagaggatggagtggcccaggcccagcggctgcgcctgacgcacgttcatgatggtcacgcccggcgggcaaatggcctgcacttccgccagcagctggcgcttcacgcgctgttccagcagggcttccagctcgtaggaggtgtcgaagtggttttccaccgcgttcttcgaggagtgcgtcaccagaacaatctctttgatcccggcggcgacgatttcgtcaacgatgtactgaatcattggcttatcaacgatcggcagcatctcctttggaattgcctttgtggccggcagcatatgcatgcctagtcctgcgaccggaataaccgctttcaaattcgccatattcatcttcacctgtttggttgcaaaacacgcggttttgcaaaattgtacatgtcacaaatccattggaactgataatacacggatactgcccgggcatctgcccgccaaattcttaaattcactgtcacgtaaaagaatacacacaactcccttttaccaacagtcagaagtgagaataatcttattttcgttcaggttattcagcggctcgttcctttgcgccgcgcgatgtggctgagaggcccgtctatcggggtctgttggccgccggccccgccgcgccgcgcgtatgcctggaaagaatagatatagataataaatttcgccaggcaatatatttcagcataaacagccggatatgacgacatattagcctgaatccgcggcggtgaactgcgatccgccctattctgcactcacttcataatatgaattctgccggttttgtgagcgggcttcgcgcttcgcttctgctctgcgcatccgcgctcaccgtgacgaaccgagggaggaagcccttttgccgccctcgctgaaacgcagcggaaaaagttctgatatcggcaagcttattccatggtggccgccatggtgttattttttcactgttcttttccggaacataattcttatcggttcgcttaatccactggaaatatatccatccacggcagggcgatatccgcgtcgttattgcattttagactcatcttatccatgatcgtgttaacacataccgcagtcgtacaggttttaatacatatggaatggattgccgatccgtcaatctgggcaggtctcgtcacgctggtggttatcgaactggtgttgggtatcgataacctggtctttatcgctatcctcgccgagaaactccctcccgcccagcgcgaccgcgcgcggatcactggcctgatgctggcgatggtcatgcgtctcctgctgctggcctctatctcctggctggtcaccctgaccaaaccgctgattgtttttcacgacttcagctttagcgcccgcgatttgattatgctgtttggcggcctgtttctgctgtttaaagcgaccgtcgagcttaatgagcggctggaggggaaagacagcgataaccccacccagcgcaaaggggcgaaattctgggccgtcgtggcgcagatcgtggtgctcgacgccatcttctcgcttgactcggtgatcaccgccgtcggcatggtcgatcacctggcggtgatgatggtcgccgtggttatcgccatcagcctgatgctgatggccagcaaggcgctgacgcgcttcgttaacagccacccgaccatcgtgatcctctgtctgagcttcctgctgatgatcggcttcagtctgattgctgaaggcttcagctttattattccgaaaggctatctatatgcggccattggcttctcggtcatgattgaagcgcttaaccagctggcgcagtttaaccgccgtcgcttcctctccgccaatatgacgctgcgtcagcgcactaccgaagcggtgatgaatctgctgagcgggcagaaagaaaaagctgaactggatgctgacacggcgtcgctggtcgccgatcaggatcaacatccactgtttaatccgcaggaaagactgatgattgagcgggtgctgaaccttaatcagcgcagcgtcagcagtattatgacgtcgcgccatgatatcgagcgcatcaacctcagcgcgccggaggaagagatccgcagcctggtggagaaaaatcagcatacccggctggtggtgaccggcgggaaagataatgaagatctgctgggggtggtgcatgttattgacctgctccagcagtccctgcgccaggagccgctggatctgcaggcgctggtgcgtcaaccgctggtcttcccggagggcctgccgctcctctcggcgctcgagcagttccgccaggcccgcacccattttgcctttgtggtcgatgagtttggctccgtcgaggggattgtgaccctcagcgacgtgatggagaccatcgccggcaatctgcccaatgaggtggaggagatcgatgcccggcacgatattcagcatcatcaggacggttcgtggacggtcaatggtcatatgccgctggaggacctggtgcagtacgttccgctgccgctggatgataaacgtgagtatcacaccgttgccggtctgttgatggagtatttgcagcatgtgccgcaggtaggggagaccattgagattgacggttatacgctgcgcacgctgcaggtcgacagccatcgggtgcagaaggtgcagatcgtcccgccggtaaagcaggatgagctggattatgaggtgtaatcgtcaggcataaaacggcccggggtatcccgggccgtaaaattgatagccagatatcctgtttaatgcctgatggcgcttcgcttatcaggcctacgggatggcgaactaatcggggtatgacacccaccgtataatccagaccgggtcaggcgtagccgccacactgcctgatggcgcttcgcttatcaggcctacgggatggcgaactaatcgggggatgacacccaccgtataatccaggccgggtcaggcgtagccgccacactgcctgatggcgctgcgcttatcaggcctacgggatggcgaactaatcggggtatgacacccaccgtataatccagaccgggtcaggcgtagccgccacactgcctgatggcgcttcgcttatcaggcctacgggatggcgaactaatcgggggatgacacccaccgtataatccaggccgggtcaggcgtagctgccacccggcatcatcgtgacatcagacgttgacgataagcacacagcccggaaacttccgggccgcgggggtgggaattacagcttatcgagcagctttttggcatcgttgccgtctttgctgcctttattacgctcaacccagtcgttgaggcgctgcttcgcttcatcctgcagctgtttgcgcaggatctggtcgacctgcagactgtagctcagcgactgccactcgccgtagatgcgcagcgggatggcggtctgtttcaggcggtcgataagtttgccctcccctttccagccgccgagcacgcgcacgttgaagcgcatatcgcagttctctttctgcagatcgagctgtccttcgccggtcatcgccatcacgtcggactgcccctgcaggcggttcagcgtcaccagcccgttatccagcgtcagccggctgctcacggaatccaggcgggttgcattgtcgtaattttcctgcgcccgcacgttggtgctgcgctccacggcctgctgcaccagctgctggaagttcagcccttcggtgcgggtatcggccatctggagctgagcctgtccctgccagtggcgacggaaatcatcggcgtcaatgcgcgttccggaaaattcgccgctcagcgacagcttgccggtcaggtttaaggaatagttaaaggccttgatcagcgaaccgatctccacattctgcagcgccggctggaacgtcgccagcggcgtgtcgccgcgggcatccagggtgccagggagagagagctgcccgccatcaagattgccctgcattttgctgaccgtcagcagcccctgctggttgctgatttcgctctgcacctgggtaaagttcagaccgcgccactgcagctggtcggcgctcagggccattcggccgttgaagccgcgcaggctctggtaatcttcgcgctcatcgctgtcggcgatcaccgggcgcagcggtcgcgtctgactctggccctgctgactggcgctactgtccgtcgccggcgacctttgcgccagcagactatcgagatcgagagtggtggcgtgcagatccagcgaccagtccgggcgttctcccagcaccacgctgccgctgccggtaacggtgctgcggttagccatcagattcaggttgtcaaaacgcagggtcttgtcatcttcctgccagctggcctgcagactcccctgaccattaatgccgtccggtgggagctcggcgccgcgcagctgccagctaagctgggtaaagtcggcttttaaggagtgcggataatcgccgccctgcacggtggcggagaagctcagcgccaggtcgcgctggtcgcggttcacccggccggagaaatccacggtggcccggtgattctcatcctgctccatctgcagacggatatcgcgcacggtcacctgctcgccgctctcatgctggaagaagagcacgctgtcggccacctgcagctgacgcacatcgtaggaccatccgcgatcctcctgggccagcggcagggtgttgtcatgcggcaccaccggcgctgagctgtcgcgaaccgcctcggttttcggggtcagctggatcaccgcgcccttgagcatcacctgcttcacctgcagctgatgcgagagcagcggcagcagcgccacgtcgaggcgcatattgtcggcgcggatcaccggctcttcggcgcctctggcggtcagcgtcatccgtccgctgagaatgctgagctgcggccagacgtgccagcgcagcgggccatcaaggtcaagctgataaccgctgcgctctgccacctcatgcaccatataggcgcgaaaatcgttgggattgaccagcaataccaacgaggtaagcccggcgacaatgaccgccagcaggatcatcagcgttgtcagtattcgtctcatggcaccctcagcaacaccccgttgacgttatcaatccttgtcgattcggctcgccaccgcgccctgctggtcgcgatatttggcgtcttcacggcggttatacggccgggccgccgggcccgataacggttcaaagctcagcgcgccgatgggcatccccgggcgcagcgccagcggcagcttgccggagttgtaaaactcaagcacgatgcagccggaccagcctggatcgatacggtgcgcggtaacgtgcaccatcagccccaggcgcgccagcgaggagcgtccgtccagccagcctaccaggtcggcaggcagggtgacagactcgtaggtcaccgccagcgccagttcgcccggatgcaggaaaaaggcctccccttccggcaggacgatctcttcgctcatcacgcggtccagcgcggcgctgacctcggccttcgggccgcttaaatcgataaacggcgccgtgtggccacggaaggtgcgaaatttattacccagccgtacatcaaccgtcgcgccattaatacgctcaacgggcggacgcggattgatggcgagtcgcccttcatccaaccaggcttcgatatctcggtcacacagacgcatgggctttctccttataaggctgcttcccgcacgcttcgcggcggagagggcaacagggctactctttgcacgttacacaattcggccaggttattcaaagaactgactgattttggccttcagaatatcaatagcgatgcggtttttgccgccgcgcggcacgatgatgtcggcatactgcttcgacggttcaataaactgcaggaacatcgggcgcacggttttctgatactgggccatcaccgaatccatggagcggccgcgctcgttaacgtcgcgcttaatacggcgcatcaggcaaatatcgagaggggtgtcgacgaaaatagagaagttgagctcgttacgcaggcgcgcatcggtcagcagcaggatcccttcaaggataatcaccttcttcggctcgacgtgaatggtgttcggcgtgcgggtatgctcgacgtagctatagaccggcagttcaatcggctggccgcttttcagcatctgcaaatgctggaacaacagactgtggtccattgagctcgggtggtcatagttggttttgacgcgctcttccatcgacagatggctttgatctttgtaatagctgtcttccggaatgacgccaatatgttcgtcgccaacttgttcacgcaattcgcgatagagagtactggcgataagacttttgccagaagccgatgcgccggcgatgcctacaatgacgcactgatgggacatatcagtcataaatttttgcgacctgattaacctggatagagatggagggtggcggcggaccgccaaacgcggcaattatagggatttcagcgtcccgataccagtggtatgcgccccgggcggctattccgccgccggcgcccagtcatcggtataccagatatgcaacagcgcgtaggatcgcatcggctgccagcggcgggcatagcgggcgatggcggccggggtcattcccggaaagcgctgtttaatcaggtaatcatccggcaaaaagatatctttcgcctgccagccgcgcagggcaaagtagtttgccgtccagcggccaatcccgggcagggtctgcagttgacgcagcccggcgtcaatatccgccggcgccgtcaggggcagctcgccgctgagcgccgcccgggcgaggtggatcaacgcctccgcgcgtcgcagcggcatccccagcgccttcagcgcctgcggatcggcccgggacagcgcctctggcgtcgggaacaagacatatccaggcgcctccgccagcggttcgccccagccagccgccactttggcggtgagccgggcggccatcgccacgctcaccagctggcccagcaccgcgcgcaccgcctgctcgaaggcatccagcgcccccggcaggcgcagtcccggccgcgcctgcgccagatcgcccagcgtgcgagcgacctgccgcgggtcgcaggctaaatcaaacagctggccaattcgcgcatagcagatctcagccaccggctgcagccccggggaaaggctcacccgcaggccctgcgcctcttcgtccggcgccagatgaatcagcccgcggtggccttccacgccaaagctgcggctgtagcccccatcgtgaaaacgctcgacgccggcgaccgcgcgcgcctgcagaaaaccaaccatccatgcccagtcatagggcggggtccagggtaacagcaccataagctctcctttatatagcgtttcaatgatagtcgcccttgaccatcagcgccttgcttttaaattccggttgtcggcatggcgacgatccgctaaagtcgccccccttcttcaccggcatggggattttgcagacgatgtttattggttttgactacggcaccgccaactgttcggtggccgtgatgcgggaaaataccccccagctgttaacgctggaaaacggcagcgccctgctgccctccatgctctgcgcgccgacgcgcgaagcggtcagcgagtggctatatcgccatcatgatgtccccacccacagcgacgaaaaccaggcgctgctgcgtcgggccatcgccgccaaccgcgacgaagacatcgaggtgctgcgcaacagcgtgcagttcggtctcgcctccctgcagcagtatgttgaagatccgcaagaggtctacttcgttaaatcgcccaaatccttcctcggcgccagcgggctgaagccgcagcaggtggccctgtttgaagacctggtctgcgccatgatgctgcatattaagttgcaggccgaaagccaactgcccgagcagatcgaccaggcggtgattggccggccgattaacttccagggcctcggcggtgatgaggctaacgcccaggcgcaggggatccttgagcgggccgcccaccgcgccggtttccgcgatgtggtctttcagtttgaaccggtggccgccgggctcgatttcgaagcgaccctcagtgaagaaaagcgggtgctggtcgtcgatatcggcggcggaaccaccgactgctccctgctgctgatgggcccgcagtggcgggagcgcgccgaccgccagcagagcctgctcggccacagcggctgccgcatcggcggtaacgatctcgacattgccctggccttcaaatgcctgatgccccttctcggcatgggcggcgaaacggagaaaggcaccgcgctgccgatcctcccgtggtggaacgcggtggcgatcaacgacgtgccggcgcagagcgatttctacagcaccgccaacggccgcctgctgaacgatctgctgcgcagcgcccgggatgccgacaaggtggctctgctgctgaaggtctggcgccagcgtctcagctatcgtctggtgcgcagcgccgaagagagcaaaatcgccctctccagcgccgccagcgtcgaaaccgcgctgccgtttattcaggacgatctggccaccgccatcgcccagcagggtctggaagccgcgctggatcagcccctgacccgcattatggaacaggtgcggctcgcgctcgacagcagccagaccaccccggacgtgatctatcttaccggcggcagcgcccgttcgccgctgatcaaaaaggcgctggccgctcagctgccgggtattccgctggccggcggcgatgattttggctcggtgaccgccgggctggcccgctgggcgcaagtggttttccgctagccctcgcccggcgctgccgcgcagcaggtctgtcctgatcctggcgctgcagattacgctggaatattcctggtctcccacgcaaaatggcctgttcgtccggacaggcctgtccactctcccccgcttccgggggcgtattatccataccgtagccagacgtctgcggtcagtaatctttgcatgccgcaagggggcgtgattgaaaagggtgtctgcgatcttcgcggcggtccggcgttgccggccgcggctcctggcaggctggctgctcagctgtggattactcttgctgctggtcgccccgcaggcgcaggcggcgacgcgccaggtggggattgatattccggttcagtggtacgccgacgacagcggccagatgaccctcgatcgttttgccgccctgcccgcagaccagctcgccaccacccggcagatcccctcctttggttattcgcgaaaaacctggtggctgcgcagcgagctgccgggcacgtggtttgccggggagccgcgctggatgcagctgggcccctcttttgtcgaccatctgactatttactatcggcctctgggcagcgatgccccctgggcacagcgcacctttggcgaccgcgacgtcgcccgcgagagcgatctgcactaccgggaaagcgtgctgatcctccccccgccgccgaccgccgccggctatgaggtagtctttcgcctgcagagcaccagcactctgatcctgctggcctcgctctcttcgccgcaggaatttgtgcagcgagcgaccgccgacaccgctttctggagcttctacttcggtctggccgccgtcgccagcggcgtggcgctgtggctggcgctggccctgcgccggcgtctgctatgggggatctgtcttttctcgctcaattatccgctggtggccgctctgcacggcttcccggagtggttcttcggccacgccgcgctgcccttccaggattttatgatcagtagcctctcgctgttcagctatgccaccgccctctggctgcacagcgagatttttgatctgaagaagaatatgccgcgacttcatcagctgctgatcgccgccgtgatactcaacctggtgctgcaggtcagtattccgctcgggttttacggcttcgcgatgcagattgaaggggtagtattcatcattatcaccccggtgctgctgttcacctcctggtggctgtggcgcaaaaaagctatcgaccgtaccaccctgctgctgggtctgctgccgccgttctatgtcgtcgccgcggtgctggtgcagttgtcgatccatgggattatcccgttccatatggcgatctattccctctggcagtacgcgctgatcgtccacatcattacggtgctgatcattgccatcctgcgggtgcgtgctgaaaaccgccagctggagcagaagcagcgcctggcgcgcgaactgcagattgagcgtgaagccagcttccaccagcggcagtttatgggcatggtggcgcacgaatttcgcaccccgctggcggtgatccaggcggcgctggagaatcttcgcctctcggcggcctcgaccagccaggaggcgcgcttcgatcgcatcggccgcgccgccacccgcctggtgcagctcaccgataactgccttgccgacgcccggctcgcctcccacgatctgcacgtcgagcgccagcagaccgccctgctgacggtgatcaacatggccgcctcggtggtggccatctcccatgatcactacctgaacatccgccagcacggcgcggtggaaagcccgcagctgcaggccgatgccggcctgctgtgcatcgccatcgctaatctgctggataacgccgtcaagtattcgccccccggtgaaatcgccatcgatattcattccgatgccgggcaaacggagctacgcattcgcgaccacggcccgggactccccgccggacaggcggaactgatctttgagcgctaccgccgcggcgagcacacatcgccggtgccaggcggcaccggtctcggactgtatgttgcgcgtcagatagtgcaggctcatgatggcaaactgtggctggccgagcatggcccggacggctgcacctttattctcaccctccccacggttgcttaagaggagaacgacgtatggctttacggctggcgataattgaagataacgccgatctgctggatgaactgctggcctggctgggctatcgcggcttcgaggtgtgggggacgcgtagcgccgaagccttctggcggcaactgcacagccatccggtggatatcgtgctggttgatatcggcctgcccggcgaggatggcttcagcgtactgaactatctgcatgagctggggcactacggtctggtggtggtcagcgcccgcggccagcagcaggataaactacaggcgctgagccttggggccgatgcctatctgatcaaaccggtaaacttcgcccatcttgccgagaccctcaccgccctcggcgcgcgcctgcgccaggaccgtccggcggctccgcctgcggaggcgatcggcacgccgccggccgtctcccccggcagctggcgtctgcaagaggataaactgatttcacccgacgcccggacgctggagttaacccagcaggaatatcgcctggtggagctcctgatgcgcaatcgcaacgaagtgtgcagcaaactggatctccatgcctgcctgttttcccatgaaagcgagcctgacctgcaccggatcgacgtggtggttagccgcctgcgtcacaaggcacgccagcaggggatccacctgcccgttcgcgcaatctttggtaagggactggcctttatttcctgaacgacggggcgcgtcggcggccgcgcggaatataaaaaactcgtaagtgttaatttttctcattttctgagagaaatgagaggaatgagactgacgatgaccttaagaactttcttatagtactagcacatcaggatgatggcgtaagattttcacgggacagaaaagcatataacaaaacgtattagccgttcgcggcaaattctgacaccatgcaacacaatcagggtaaaaacgatggccatgcaaacgtggttagttttattgctatgcatttttttcttcagcatctctgtatacagttttatttcctatctgaaagacaggaggcggcagaaatttacttttaacgataagcgttcgatgcgtcgtaaataattcactttaaaataataaaaaattattgtaggtacttttatatcttcaacacaccgcatacgcccggaggatttgtcacagcatggcgttatgttttgcgtaaggaaataacgccatgagaaacattaatgtcaccatcaacacccgcaacgcctttgtccgtgaatcgctggtggccatggtcaatgacctcacccggggcgatctgcgggcgcgtttttcctggcgtaacaccgatctgtcagatgaagatatcattatctgcgaagtgatccccggggaaatatacctgtgtaataccctgattaagaacagaaaaagaggaagctcgctgattatcctccatagctatgaccagctgccggaagatgagttcatgattaactgcctgaaaggggtcatttttgtttcgctaaaaacggctagtattccgcaattgctgacgatcattaaaagcgagctccagcattgtatgacccccacggctaccgacgccgcaggccgggaactcagctgcgccagctgtccgcatcgcgtgttatcgcgatcgcagaccgccgtagtgcacggtattctcgaagggctggatatgagtaaaatcgccgcgctgcagcgtgtgagtccccgcaccgccgcctatcataagaataagatcatggaaaaatacagcctgaataataatcatgaatttttccagtttatgaatcttttacgtgagcgctggtaggcaaacagcagcacaaaaaaaataagatattgacctggctatattgtcggaaatccgaaaatagccgcaggatgctaaaaaatatccagcgctggcggacataacgttaaactctgacgcttcctcggtataaagacgttaccgcccgtctttatataataaaaaacacgctacacgaggaaaactgatacttcgtcacattgcccctgacgtgcctgtcaggggtccttttttccttgtggaacagcgccctcagtgaaagggcgcggcaggatcaggcttccgctttctccacttcccagtccggctgcgcttcctcgtcggtcagcaacccttcatttttcgacagcatcgcggtggcgatgccattacccagcacgttgatggcggagcgccccatgtcgaggaaatggtcgatacccatcagcagcaggatcccggcgaccggtatattgaagctggggatcgtcgccgccagcaccaccagcgccgaacgcggcaccccggcgatacctttcgaggccagcatcagggtcagcatcatgaccgtaatctcgctaaagctcagcggcacgttataggcctgggcgataaacatcgcggcgaaggagcagtagaccatcgagccaacgaggttgaacgagtagccaatcggcaggacgaacgagacgatattgcgcgagcagccaaacttcaccagtcgctcgagggtcttcggataggccgcttccgagctgctggtggtaaaggccaccagcaccggatctttcagcatgttcagcaggcggaaaacctcttttttcagcaccatatagccgacggcaatcagcaccgcgctggtcaacagcaccgccaggtagtagccgccgatgaacgaagcatagttgagcaggatccccagcccctgggaggcaatcaccgacgagatggcggcgaagatggccagcggcgcaacgtacatcacatagcccgtcaccttcagcataatgtgcgacaccacgttaagggccgccaccagcggagcattaaacttctcccccagcgacgcgccggcgatgccgaagaacatcgagaacaccacgatctgcaggatctcgttgttggccatcgcctcggtgatgctggtggggatggtgtgcgacaggaatcctttcaggctcatgccgctgaccgccaggccggtatccaccgcctctttcggcaccgccaggtttaacccggcgcccgggtgctggaaggtgacgatcaccagcccgacgagaatggataataccgaggaggtgatgaaccagaccatcgccttgccgcctacccggccgatggtcgccgtctcgccgaggcgcataatgccgaccgtcagggtgctgaacaccaacggcgcgatgaccattttgatcaaccgcagaaacagatcggtgagcagagtaatattgtccgcccaggcggagacggtggttggcgtcgcgtaggcatggatagccgcgccggagaggatccccatcagcataaaaatgacgatgaagagcgtgagtttgtttgcgtttgccacagcaatgacccctgattatttaacacgttgatttttaagtgcatattttattattatgagaatgcactgatttattcaccgcataaatctaattaaagcccccgcggatacaactattttttgcttttttaaactaaaagttgatatcaccccggatatcggccgcgggagcgcccggcgtcgcggcggttatccagacatttctcaaccttcttttcataattcctccatttttacggccccttccctcactaaactagtatcattcagcgaaacgcttcaggatgagaccgtaaactaatgaaaggcagtaacatacgtcgttggggcgccgcgctggcggtagtgattatcgccggggccgcctactggttctggcacgatcgcgggacgagcagcagcggggctcccgccgccgagcagggcccgcaggggccgggcggcgcacgccatggccgctttggcgccgcgctggcgccggtgcaggcggccaccgccaccgaagaagcggtcccgcgctatctcaccgggctgggtacggtaacggcggccaacactgtcaccgtccgcagccgggtcgacggccaactgctgagccttcacttccaggagggtcagcaggtcaaagccggcgacctgctggcgcagatcgaccccagccagtttaaagtcgctctcgcccaggcgcagggtcagctggcgaaagatcaggccacccttgccaacgcccgccgcgatctcgctcgttaccagcagctggtgaagaccaacctcgtctcccgccaggagctcgacactcagcagtcgctggtggtggaatccgccggcacggtgaaagctgatgaagcggccgtcgccagcgcccagctgcagctcgactggacccgcattaccgcgccaattgacggccgcgtcggcttaaagcaggtcgatatcggcaaccagatctccagcggggataccaccgggatcgtggtccttacccagacgcacccgatcgacgtggtctttaccctgccggaaagcagcatcgccacggtggtgcaggcgcagaaagcgggcaaagcgcttagcgtcgaagcctgggatcgcaccaataagcagaaaatcagcgtcggcgagctgctgagcctcgacaaccagatcgatgcgaccaccgggaccatcaagctgaaggcgcgctttagcaatctggacgacgcgctgttccccaatcagttcgttaacgcccgcctgctggtggacacccagcagaacgcggtggtgatccctgccgccgcgctgcagatgggcaacgaagggcatttcgtatgggtgctgaacgatgagaataaggtcagcaaacacagcgtgacgcccggcatccaggacagccagaaagtagtcatcagcgccgggctttccgccggagatcgcgtggtcaccgacgggattgaccgcctgaccgagggagcgaaggtagaagttgtcaccgccagcagcggcgagcaggcgcagcccgccccgcgccagagcggtaaacacggagcgcgttcctgatgcaggtgttacctccaggccgcaccggcggcccgtcccggctgtttattatgcgtccggtggccaccactctgctgatggtggctatcctgctggccgggatcatcggctaccgctttctgccggtctccgccctgccggaggtcgattacccgaccattcaggtagtcaccctctatccgggcgccagcccggacgtggtgacctccgccatcaccgccccgctggagcgccagttcggccagatgtcaggcctcaagcagatgtcgtcgcaaagctccggcggcgcctcggtagtcacgctgcagttccagctgaccctgccgctggacgtcgccgagcaggaagtgcaggcggccattaacgccgccaccaacctgctgccgagcgatctgcccaacccgccggtctacagcaaggtgaacccggcggatccgccgatcatgactctcgccgtcacctcctccgccatcccgatgacccaggttgaggacatggtggagacccgggtggcgcagaagatctcccaggtttccggcgtcggtctggtgaccctcgccggcggccagcgcccggcggtgcgggtgaagcttaacgcccaggccatcgccgccctcggcctgaccagcgaaaccgtgcgcaccgctatcaccagcgccaacgttaactccgcgaaaggcagcctcgacggtccggcccgcgcggtgacgctttccgctaacgatcagatgcagtccgctgaggattatcgccggctgattatcgcttatcagaacggggcgccgatccggctcggcgatgtcgccagcgtcgaacaaggggccgaaaacagctggctcggggcgtgggccaaccagcagcgggccatcgtgatgaacgtccagcgccagccgggggccaacatcatcgacaccgccgacagcattcgccagatgctgccgcagctcaccgagagcctgccgaaatcggtgaaggtgcaggtcctctccgaccggaccaccaacatccgcgcctcggtgcgcgacacccagtttgagctgatgctggccatcgccctggtggtgatgatcatctacctgtttctgcgcaacgtgccggcgaccattattcccggcgtcgcggtgccgctgtcgctggtgggcactttcgcggtgatggtgttcctcgacttttcgatcaataacctgacgctgatggccctgaccatcgccaccggcttcgtggtggatgacgccatcgtggtgattgagaacatctcgcgctatatcgaaaaaggcgagaagccgctggccgccgcgctgaagggcgcgggggagatcggcttcaccatcatctccctcaccttctcgctgatcgcggtgctgatcccgctgctgtttatgggcgatatcgtcggccgcctgttccgcgaattcgccgtcacccttgccgtcgctattcttatctcggcggtggtctccctgaccctgacgccgatgatgtgcgcccgcatgttaagccacgaatcgctgcgtaagcagaaccgattctcgcgggccagcgagcgtttcttcgaacgggtgatcgccgtctatggccgctggctgagccgggtgctgaatcatccgtggctgacgctcggcgtcgccctgagcaccctggcgctgtcgattatcctgtgggtctttatcccgaaaggctttttcccgatccaggataacggcattatccagggtaccctccaggcgccgcagtcggtctccttcgccagcatggccgagcgccagcggcaggtggccagcattatccttaaggatccggcggtggagagtctgacctccttcgtcggcgtcgacggcaccaacccggcgctgaacagcgcccgtctgcagatcaacctcaagccgctggatgaacgcgacgatcgcgtccagacggtgataagccgcctgcagcaggcggtggacggcgtccccggcgtggcgctctacctgcagccgacccaggacctgaccatcgacaccacggtgagccgcacccagtatcaattcaccctgcaggcaaactccctcgaggcgctgagcacctgggtgccgccgctgctcagccgcctgcaggcccagccgcagctggccgacgtcagcagcgactggcaggacaaaggcctggccgcctatatcaaggtggatcgcgacagcgccagccgcctcggcatctcaatggccgatgtcgataacgcgctgtacaacgccttcggccagcggctgatctccactatttacactcaggcgaatcagtatcgcgtggtgctcgaacaggataccgaggcgacgccgggcctggcggcgttggagaatatccgcctcaccagcagcgacggcggcatcgtgccgttgaccgccatcgccacggtggagcagcgctttaccccgctgtcggtgaaccacctcgatcagttcccggtgaccaccatctcgtttaacgtcccggacaactactcgctgggcgaagcggtggaggcgatcctcgccgccgaacagtcgctggatttcccgaccgatattcgcacccagttccagggcagctcgctggccttccagtcggcgctcggcagcaccgtctggctggtggtcgccgcggtggtggcgatgtatatcgtgctgggggtgctgtacgagagctttatccatccgatcacgattctctccaccctgcccaccgccggggtcggtgcgctgctggcgctgtggctggcgggcagcgagctggacgtgatcgccatcatcggcatcattctgctgatcggcatcgtgaagaagaacgccatcatgatgatcgacttcgcgctggccgctgagcgcgagcatggcatgccgccgcgggaggcgatctaccaggcctgtctgctgcgttttcggccgatcctgatgaccaccctcgccgccctgctcggcgccctgccgctgatgctgagcaccggcgtcggcgccgagctgcggcgtccgctggggatcggcatggtcggcggtctgatgctcagccaggtgctgaccctgttcaccaccccggtgatctatctgctgttcgaccgcctgtcgctgcacctgaagcgccgcttcccgcgtcaggaagaggaggcgtaagtgaagtttttcgccctcttcatttaccgcccggtggcgacgatcctcatctcgctggccatcaccctgtgcggcattctcggcttccggctgctgccggtagccccgctgccgcaggtggacttcccggtgatcatggttagcgcctcgctgccgggagcctcgccggagaccatggcctcgtcggtggccaccccgctggagcgctccctggggcggattgccggggtcaatgagatgacctcctccagctcgctgggcagtacgcgcatcattcttgagtttaacttcgaccgcgatatcaacggcgcggcgcgcgacgttcaggcggcgatcaacgccgcgcaaagcctgctgccgagcggaatgcccagccggccgacctatcgcaaagccaatccgtcagatgcgccgatcatgatcctgacgctgacctcggacacctactcccagggtgagctgtatgatttcgcctccacccagctggcgcagaccatcgcgcagatcgacggcgtgggcgatgtcgacgtcggcggcagctccctgccggcggtgcgcgtcgacctcaacccgcaggcgctgtttaaccagggcgtgtcgctggacgcggtgcgcaccgccatcagcgacgccaacgtgcgcaaaccgcagggggcgctggaggacagcgcgcaccgctggcaggtgcagaccaacgatgagctgaagaccgccgccgactatcagccgctgatcgtccactatcaaaatggcgccgcggtgcggctgggagatgtcgccaccgtctcggattcggtgcaggacgtacgcaacgccgggatgaccaacgccaaaccggcgatcctgctgatgatccgcaaactgccggaagccaatattatccagacggtggacagcatccgcgcccgcctgccggagctgcagcagaccattccggcggctatcgacctgcagatcgcccaggaccgctcgccgaccatccgcgcctcgctggaggaggtggagcagacgctggtgatttcggtggcgctggtgatcctcgtggtgttcctgttcctgcgctcgggacgcgccacgctgatcccggccgtcgccgtcccggtttccttaatcggcaccttcgccgcgatgtatttgtgcggcttcagcctcaataacctgtcgctgatggccctgaccatcgccaccggcttcgtggtggatgacgctatcgtggtgctggagaatatctcccgccatcttgaggcggggatgaaaccgctgcaggcggcgctgcaggggagccgcgaggtgggctttaccgtgctgtcgatgagcctgtcgctggtggcggtgttcctgccgctgctgctgatgggcggcctgcccggccgcctgctgcgcgagttcgccgtcaccctgtcggtggcgatcggcatctcgctggcggtctccctcaccctgacgccgatgatgtgcggctggctgctgaaaagcggcaagccccaccagccgacgcgcaaccgcggctttggccgcctgctggtggccgtgcagggcggctatggtaaatcgttaaaatgggtgctgaagcacagccggctgaccggcctggtggtgctgggcaccatcgccctcagcgtttggctctacatttcgatcccgaaaaccttcttcccggagcaggacaccggggtgctgatgggcggcattcaggccgaccagagcatctccttccaggcgatgcgcggcaagctgcaggactttatgaagatcattcgcgaagatccggcggtggataacgtcaccggctttaccggcggctcgcgggtcaacagcgggatgatgtttatcaccctcaagccgcgcgaccagcgccacgagacggcgcagcaggtgatcgaccggctgcgcaaaaagctggccaacgagcccggggccaacctgttcctgatggcggtgcaggatatccgcgtcggcggccggcagtcgaacgccagctatcagtacaccctgctgtccgacgacctgtcggcgctgcgcgagtgggagccgaagatccgcaaaacgctggcggcgctgccggagctggcggacgtcaactccgatcagcaggacaatggcgccgaaatggacctggtctatgaccgggataccatgtcgcgcctcggcatcagcgtccaggacgccaacaacctgctgaacaacgcctttggccagcggcagatctctaccatctaccagccgctcaaccagtataaggtggtgatggaggtggatccggcctacacccaggacgtcagcgccctggataagatgttcgtcattaacagcgacggcaagccgatcccgctggcctacttcgccaaatggcagccggccaatgccccgctgtcggtgaaccaccaggggctgtcggcggcatccactatctcctttaacctgcccaccggccgctcgctgtcggaagccagcgaggccattgaccgcgcgatgacccagctcggggtgccgtcgagcgtgcgcggctcctttgccggtaccgctcaggtgttccagcagaccatgaacgcgcaggtgatcctgatcctcgcagctatcgccacggtctatatcgtgctgggggtgctatatgagagctatgtgcatccgttgaccatcctctcgacgctgccctccgccggggtgggcgctctgctggcgctggagatcttcgatgccccgttcagcctaatcgccctgattgggattatgttattaattggcatcgttaagaaaaacgccatcatgatggttgattttgccctggaggcgcagcgcaacggcaacctgacgccggaagaggcgattttccaggcctgcctgctgcgtttccggccgattatgatgaccaccctcgccgcgctgttcggcgccctgccgctggtgctctccgggggcgatggctctgagctgcgccagcctctggggatcaccatcgtcggcggtctggtgatgagccagctgttaacgctctacaccacgccggtggtctatcttttctttgaccgtctgcggctgcgtttttcgcgtaactcctctcaaccggtaagcgaataacatgacagacctcccggccagcgtgcgctggcagctatggatagtggcgttcggcttctttatgcagtcgctggacaccaccatcgttaacaccgccctcccctcgatggccaaaagcctcggggagagtccgctgcatatgcatatgattatcgtctcctatgtgttaacggtggcggtgatgctgccggccagcggctggctggccgaccgggtcggggtgcgcaatatcttcttcaccgccatcgtgctgtttaccgccggatcgctgttttgcgcccaggccagcaccctcgaccagctggtgatggcgcgggtgctgcagggggtcggcggcgcgatgatggtgccggtcggccgcctgacggtgatgaagatcgtcccgcgcgatcagtatatggcggcgatgaccttcgtcaccctgccgggccaggtcggcccgctgctcggcccggcgctgggcggggtgctggtggagtacgcctcctggcactggatcttcctcatcaatatcccggtggggatcgtcggcgcgatcgccaccctctgtctgatgcccaactacaccatgcagacccggcgcttcgatctctctggctttctgctgctggccgccggaatggcgaccctgaccctggcgctcgacggccagaaagggctcggcatttcccctgcctggctggcggggctggtggccgtcggcctctgcgccctgctgctctacctgtggcacgcccgcggtaacgcccgggcgttgtttagccttaacctgtttcgcaaccgcaccttctctctcggcctcggcggcagcttcgcgggacgcatcggcagcggcatgctgccgtttatgaccccggtgtttctgcagatcggcctcggcttctccccctttcacgccgggctgatgatgatcccgatggtgctcggcagcatgggcatgaagcggatcgtggtccaggtggtcaaccgctttggctaccgtcgggtgctggtcgccagcaccctgggcctggcggcggtcagcctgctgtttatgtttagcgccctggccggctggtattacgtgctgccgctggtcctgtttctgcaggggatgatcaacgccagccgcttctcctcgatgaataccctgacgctgaaagatctcccggacgatctggccagcagcggcaacagcctgctgtcgatggtgatgcagctgtcgatgagtatcggcgtgaccatcgccgggctgctgctggggctgtatggccagcagcatatgagcctcgacgccgccagcacccatcaggtctttctctacacctatctgagcatggcggcgatcatcgccctgccggcgctcatcttttcccgggtaccggatgacgtcggcagcaataccgtcctccgtcgacgcaacaggagtggatcgtgaaattttggcgcccgggtattaccggcaagcttttcctcgctatattcgccacctgcatcgtgctgctgatcagcatgcactgggcggtgcgtatcagttttgaacgcgggtttatcgactatatcaagcgcggcaatgagcagcgcttaaccatgctcagcgacgcgctgagcgagcagtatgcccagcatggcagctgggcgtttctgcgcaacaatgaccgctttatcttccagctgctgcgcaccttcgaacgggataatgacgaccgctcgccgccggggcacgccatgaagccggacgccgccccggacgggccgccgccggatggcccccctgacggcccgcgcccgaggccggaaatgccgccccacggctggcgcaccatgttctgggtggtggatcagtcggggcgcgtgctggtggggccgcgagagcgcgtcccggaggatggtacccagcgcagcatcgtggtcaacggcgcggaggtgggcaaagtgatcgcctcgccggtagagcggctgacgcgcaataccgacattaacttcgaccggcagcaaaagcgcaccagctggctgattgtcgcccttgccaccctgcttgccgcgctggccactttcccgttggcccgcggtctgctggcgccggtgaagcggctggtggaaggcacccataagctggcggcaggcgacttttccacccgcgtgacggtgaccggcggcgatgagctcggccgcctggcgcaggattttaaccagctcgccagcaccctggagcgcaaccagcagatgcgtcgcgatctgatggccgatatctcccatgagctgcgcaccccgctggcggtgctgcgcggcgagctggaggcgattcaggacggggtccggcgctttacccccgagtcgattccctctctgcaggccgaggtggctactctcaccaagctggtggacgacctccatcagctgtcgatgtccgacgagggggcgctggcctaccagaaaacctcactggatatcatcaccctgctggaagtggcggcgggcgcttttcgcgagcgcttcgccagccggcagctaagcattcaggtgtcgctcccggagcaggcgatgatcttcggcgaccgcgaccgcctgatgcaactcttcaacaatctgctggagaacagcctgcgctataccgacagcggcggcagcctgcacatcaccgcccgccgcagcggccggatgctggtgattgacttcgctgacagcgcccccggcgtcagcgatgagcagctggcccgcctgtgcgaacgcttttaccgggcggaaggatcgcgcaaccgcgccagcggcggctccggcctcggactggcgatttgcctcaatatcgtagcggcccacggcggcaccctgcgtgccgaccattcgccttttggcggggttagcattaaagttgagttacctctggaacatgatttaccgagagacatatgactgaattgcctgtagatgaaaacaccccacgcatccttatcgtggaagatgaaccgaagctcggccaactgctgattgattatctgcaggccgccggctatgcgcctgcgttgattaaccacggcgacaaggtcctgccctacgtccgccagacgccgccgcacctgatcctgctggatctgatgctgcccggtaccgacggtctgacgctgtgccgggaaattcgccgcttctccgatgttccggtggtgatggtgacggcgaaaatcgaagagattgaccgtttgctggggctggaaataggcgccgacgactatatctgcaagccctacagcccgcgggaagtggtcgcccgggtaaaaaccatcctccgccgctgcaaaccgcagcgcgatctgcaggcgctggacgcccagagcccgctgattgtcgacgaaggtcgttttcaggcctcctggcgcgacaagctgctggacctcactcccgccgagttccggctgctgaaaaccctctcccaggagccgggcaaagtgttctcccgcgaacagctactcaaccatctgtatgacgattatcgggtagtcaccgatcgcaccatcgacagccacatcaagaacctgcggcgcaagctggaggcgctggacgccgagcagtcgtttatccgcgcggtgtatggcgttggctaccgctgggaagcggacgcctgccggctggcgtagttagccttttcccggctcgcgctgcgcttcgccgggctacacgttcaccgccatctgcaatccgtagcccgggtaaggcgtttacgccgcaacccggggaactccctagagcctatcccaccagacgttattaacgctgtcagtgtgagcactgcccaggttcaaaatagcaaacaaattagccatactgaaagatacctatctgatatttactccccttcgccgcggcgctacaatgcccgcccttaatgtggggacactccccaactcgccgcaccaggtgcggcgaatctgacctgtcatcagaacgagaacaccatgtttaaaccagaactcctctccccggcgggaacgctgaagaatatgcgttacgctttcgcctatggcgccgatgccgtttatgccggtcagccgcgctactcgctgcgcgtgcgtaacaacgaattcaatcacgaaaatctgcagctcggcatcaatgaagcccacgcgctgggtaaaaaattctatgtggtggtcaacatcgccccgcataacgccaagttgaaaacgtttattcgcgatctgaagccggtggtggagatgggtccggacgcgctgatcatgtccgatccgggtttaatcatgctggtgcgggaacacttcccggagatgccgatccatctttcagtgcaggccaacgccgtcaactgggcgacggtcaaattctggcagcagatggggctcacccgcgtgatcctgtcgcgtgaactgtcgctggatgaaatcgaagagattcgccgccaggtgccggagatggagatcgagatattcgtccacggcgcgctgtgcatggcctactccggccgctgcctgctctccgggtatatcaacaagcgcgacccgaaccaggggacctgcaccaacgcctgccgctgggaatacaacgtggcggaaggcaaagaggacgacgtcggcaacatcgtccacaaatatgagccgatcccggtgcagaccgtggagcccaccctcggcatcggcgcgccgaccgataaagtctttatgattgaggaagccaaacgtccgggcgagtacatgaccgcctttgaggacgaacacggcacctacatcatgaactcgaaagatctgcgggctatcgcccacgttgagcgtctgacccagatgggcgttcactcgctgaagatcgaaggccgcaccaaatccttctactactgcgcgcgcaccgctcaggtttaccgcaaggcgatcgacgatgccgccgccggcaaaccgttcgataccagcctgctggagaccctggaggggctggcccaccgcgggtacaccgaaggcttcctgcgccgccatacccatgacgattatcagaactacgagtacggctactccgtctccgagcgccagcagtttgtcggcgaattcaccggagagcgtaacggcccgctggcggccgtggcggtcaaaaataagttcagcgtcggcgacagccttgagctgatgaccccgcagggtaacgtcaacttcacccttgagcatatggagaatggcaaaggcgaaaccatgccggtggccccgggcgatggctataccgtctggttgcctgtgccggacgacctgcccctgcagtatgccctgctgatgcgcaactttactggtcaaacaaccagaaatccgcacggtaactagttaatttgcgttattttttcacgatgtaaggatattagaatcggatcacataccgtttcgatcgaaacaggtatcatccatttcgctgaaaaacataacccataaatgctagttgtaccaggaaccacctccttagcctgcgtaatctcccttacgcgggcttatttttttgcctctcctccggtcttcgctttcgtcatgcggtacactttatgcaacattgagcaataaaggttcccttgatgatgtctacgtttcctgccagcttactgatccttaacggcaaaggtgccaatgaaccgcagctacgcgaagcggttaacctgttacgcgatgaagggattgatattcacgtccgcgtgacctgggaaaagggcgatgccgctcggtttatcgatgaagccctgcagctgaacgttgaaacggtgatcgccggcggtggcgatggcaccattaatgaagtggcgaccgcgctggtggagcgcggcggcaagatggcgctagggattttaccgctgggcacggctaacgactttgccaccagcgtcggtattccgcaggatctggccagcgccctcaagctggcgatcgtcggccgcgatgtgccgatagatatcgcccgggtgaatgataaaaccggctttattaatatggcgaccggcgggttcggcacccggatcaccaccgaaacgccggaaaaactcaaggccgcgctcggcggtgtctcttatttaatccacggtctgatgcgcatggataccctgaagccggaccgctgcgagatccgcggggagaactttcactggcagggcgatgcgctggtcatcggcatcggcaacggccgccaggccggcggcggccagcagctgtgtccggaggcgttgattaacgatggtctgctgcatctgcgcattttcaccggcgaagagctgatccctgccctgttcagcaccctggcgaatccggaaaactcgccgaatattgttgacggtgtctcctcatggtttgagatcaccgccccccatgagatgacctttaacctcgacggcgagccgctcagcggcaaaaccttccgtatggagctgttaccggcggccctgcgctgccggctgccgcccgactgcccgctgctacgctgatcaggcttcgcaaagcaaagacggtgcccggctggtatacagcagccgggttcgttgattgagcctctgaatgttaaggtaaaacggcacctgcggctgcaggaaaaacctgggcaggatatcgatccaaacaacgcgcttacattaatagacgatacccacaaccacaaaaaaacctataacatcaaatagttacctattaaaatgggcgcatctgccgtgagacaatgcgccataaagcttagtattccgccacctcgcgcgccatttcgcgcgtatattgccgactggcgttaaccagcatctgcgtataggccatctgcgcctggccgctgaccagcgcatcgaccgtcagggtttcgaggatcttcccgtactgcatcaccgccactttctggcataagtgggcaataaccccaagatcgtgggtgaccatcaggtaagtgagcttagcctcccgctgcaattctgccagcaggttaaggatctcagcctgcaccgacacatccagcgccgacgtcggctcatccagcagcagcacctgaggctcaagaatcagcgctctggctatcgccacgcgctgccgctgcccgccggagagctgatgcggatagcgctcgcgaaaggcgcggttgaggcctactttatccagcagcacattgatccgccggtcgcggtcgttgatacgatggatctgcagcggctcttcgagaatatcgccaatggtgtgacggggatgcagcgatccgtaggggtcctgaaataccatctgcacctgacggcagcgctcgcggctaatttcatgccctaagggctgagcatcgatggtcagttccccctgccagtgggtaaacagccccgccaggcacttgagcaccgtcgttttaccggaaccggactctcctaccagaccgtagatctcgccgggcttaacgtggaaactgacgtcatacagcacctggttacgcttctccccctcgccaaacgcgaggttgagatgttgaacttcaatcattatccgctccttaatccgttaaccagctggcctgacgctgcagcaccggcagtatcgggcgacgatgctgcatatccggcagcgagttaatcaatccctgagtgtaggggtgacgggcgtgatcgagatctttagcggcgatggactccactacccgtccggcgtacatcaccagcacccggtcgcagaagctgcgcaccaggttgatatcgtgactgataaaaatcagccccagcccgcgcgactgaaccaggtcatccagcaggcccagcacctgcaggcgcaccgacacgtccagcgcggaggtgggctcatcggcaatgatcagctccgggtcggtaatcagcatcatggcgatcatgatgcgctgcccctgtccgccggatatttcatgcggataaagctgataaacgcgctccggctggcgaatacgcaccacctccagcatctccagcgccctggctttcgcctcatctttacgcccgggatgatgagtaagccaggcctcggcgatttgcttacccacgcagaccaccggattcagcgaatatttcggatcctgcataatcatcgagatacgtttgccgcgtacgccgcgcatctgcgcttcgctaagatgctgcagatcgaggtcggcaaactgcatccggctggcgctgacgcgggcctttttcggatgcagctgaagcagcgcgcgcccaacggtggacttacccgaaccggactcgccgacaatagccagcttctcatgccccagctggaaggagacgccgcgcacggcgtgggtcaccgcgctaccgttaacaaagtcgacgcacaaatcgcgcacgtcgagcagcggtgcattattcactacggggatcgaggatgtcacgtaggccatctcctaagaagttgaacgctaagctattgatcaaaatcgccagccccggaatggttacgacccaccagcactccatcatataagtgcgcccgctggagatcatcgctccccactccggctctggcggctgcgcgccgaggccgagaaagcctaggccggccgcggtcagaatgatcccggccatattcatggtgatacggataatgaccgagggcagacacagcggcacgatatggcgccagaggacgcgggccgatgaagcgccctgcagacgcacggcggagataaaatcagcctggcgcagagagagcgtttcggcgcgcgccagacgggcaatcggcggccaggcggtcagcgtgatggcgataaccacgtgctccagccccggtcctaaagcggcgacaaacgccagcgccaggaccagactcgggaaggagatgaaaatatcggtgacgcgcatcagcaccatatcgactttaccgccgaaatagccggcactgacgcccaacagcagtccgagcggaccgacggtcaccgagaccagcagcacgatatagagcgtgatgcgggagccgtacaccaggcgactaaagatatcccggccaaactcatcggtgccgaaccagtgctgcgcattcggcgcgaccagcgcactattcaggtcctgtaccagcgggttataaggcgcaatcagcggcgcgaaaatcgccaccaccagcagcataaagataattcctccgccgatggccgtgagcggattgcgcgccattttgccgataaacccgacggcccgcgccgccgcgcgttgcagccgctgacggacttcgcccgcaccacccgaaagcggcgaatccagagaaacggtcatgattttgtcctcgggtcaaagaattgatacagcatgtcggagagcaggttgagcatcacgaagatcacccccaccagcagcacgcagcccatcaccgcattcatatcgcccagcagcaagcttccggtaaggtaggagccaaaccccggccatgagaagacggtttcaatcagcaccgcgccttccagcagcgcgccgtaggccagcgccaccaccgtcagcagttgcacgaggatgttacgaaacgcatggttccagataacctggcgctcggtcagccctttcacccgggcggtaataatgaactcctgcgacagctgggccagcataaagctgcgggtcatacggctgatataagccagcgagtgaaaacccagcagcgaggcgggaagaatcagatgattaatggcgttccagaacacctggccgttgccggccagcagcgcatcaacggtcatcagcccggtgcggcgcggcaccacaccatccagcccgagatctaccctcccggcgccgcctacccagccaagccaggcatagaacaccagcagccccatcatcccgacccaaaagatcggcgtcgagtagcccgccaggctgataatgcgtaccacataatcggagacgctattgcgccgcgccgccgccaacacgcccagcggaataccaagacccgcgccgacaataatcgccatcgttgccagctccatggtggccgggaagacgcggataatatcgtccaccaccggtttcccggtcagcagcgcgttgcccagatcgccgtgcaacaggttgacgaaatagatgccaaactgggtggtcagcgatttatcaaaccccagctgctggtaaacctgctgataggtactctggtcagcatccgggccgacaatcgccagcaccgggtcgatgggcatgacgcggccaatggtaaaggtcagcagcagcaggccgaacagtgtaatcaccacctgcagtagccgttttgataagcgccggccgcgtgagccgggcgcaaggattgcggtactcatcctttctctccttcgcggactttatagacgtcacgcagaaaagtggtggcggaggggtgcggctgatactcccgtacctcgttgcgcacgacgaccgaatcaaccatctgcgaaagcggaattaaagccggaaccagctggtcgtagcgtgtctggatggcctggtagtcagccacctgtttttgcggatcgcgttccagcagggcctggtcaatcatcgtgttcagttgcgggtcgtaaaaaccggtacgccagccctggaagttggtcaggcgcgccttatcgctgttatccgggttatagaccagcgcgcgcaggctggagtgcggatgcggctccatcccgctgccgccgcgacctaccagcaggtcaaatttacgctcgcgcattgcgccgtagatctggttaccagtgccggtgatgattttggcgttaatccccgcctgcatcagcgtcgactgcacggcgatagcgatgttaagaaatggctgatcggagagtacccgcagcgtggtatcaaagccgttgggatatcccgcttccgccagcagctttttcgcccgcgccacatccagcctgtagccgggatcgggtagcgtggacggcattcccgctttgataggccgctggtgcagcacgccgtagcccggcatcagcgctttattgataccctggtaatcaatcagatagcgcaccgcctcgcgcactttcggattggcgaagtgcgcctctttcatgctcatcgccacgtagtacatggtgccgcgctgcaccgcatcgacggtcagctgcgggtcgctgcgcagggcgttgatatcggaaaccgccatattgttggcaatatcaaggtcgcctttttcgatcatcaggcgcagagtttgcgactcctggaaatgacgcagtaccacgcggctcattttcgcctcgccgcgccagtagtcagggttgcgcttcatgcgcagcacatctttcgcctgccaggtttcgaggataaacggcccggaaccggcttcatgggtggttagccagcggttaccccagtcgttatcctgctggtggctttgcaccgttttactgtccagcactccgaggttgcccagcgccgccagcgagtaaatcaccagctgcggatcgttatctttgggtaatacgatttgcaccgtgaagcggtccggcgcgctgacctggctgtcgatatttttcttactgaagccataggatttccatactgaggcctgggccaggttgaggtgcaggatgcgccgcattgaccacacgacgtcggcggcggtcagcgggtttccggagtgaaacttaacgtcatcgcgcagatgaaaggtcagggttttgccgtcggggctgatatcccaggatttcgccagcgcgggcctgacggtggtgagctgctcagggtcaagctccaccagcgagtcgtagaggttgaccacgatccccaccacttcgttaccggtcatcgccgccgggtcaagggtgagcaggttattcatattcatgccgatgatcagctggtcgggcggcgttttcgccaccgcctccccgctccccatcgacatggcgagcgcgagaatacacgctcccagtaaggaggtttttttcatatctctgtttgcctgtactgtagggtacatgttgccggatggcggcattttcggcttatccggtctaccgggccgcaggctcgataagcgcagcgccatcgggtatttatttttttaaatcagtcgtggctaacggtattggcttcgatatacgcaaaattaatgtcttcaccgagacccggacgttgtgacaaatgcacaaatccctggtcatccatcgggtcgacaatgctgttgagataggccgccggttcatcgtagtcgaggaacggatgcagcaggccgcgctcgtaccagcggcagttgcggatcgcgcccaccaccgccaggcttgccgctccgttgccgtggacttcgcaatccatgccgaaagattccgccagcgccgccaccttcatggtcggtgtaatccccccacgccgttagcgccggcgcgcagaatgtcgcaggccccggctttcacccattcggcgcgcatgtggtgcttgccgccgaagctctccggcccgacgatgggaatcgacaggttttccgccagccacgcataggaggacatcgaatcctcctccatcggctcttcaaaccaggcgaaattgagtttttccagctctttgccgatccacagcgcctcggcgcggctgtaccagtgatagccatcaatcatcaggtcaatatccggccctacggcttcgcgcaccgccgcgcaggctttaatgtccattttgggattgggcgcaaaagagattggcggcatccaggtgtgcagtttgatggccttgtagccgcgggcgaccagcttctcagcaaaagcggcatactcttccggggtcgacaggccgcccggtagatcgtcgccgcacatggtgctaccgtaagccgggacggtgtcgcgatagccgccaagcagcttgtagaccggcatcctgaggctgcggccaatcaggtcccacagcgcttgttcaacaaacgacagcgcgcgctccgttagctgatgtgcgctgccgcgctgccagtggttaagatcctgccagatacgctcgcggttaaacgggtcctgccccaccagcactttgcgaaaaaaagtattcaccacgaacgggcgcacgacttccggaggcgcaaacgaaaaaccctgcgccccatcatcagcggtgatggtcagcatcgccattttggccatgctttcagcccccggatgggagtgcccggcgctgtcggaaacccgacgagtgggatactggaaaacggtgacattcacagattcaattttcatgctcaatccttatcacggccaaatccgatcgacagaggcaaatcggcaaagcggtttcacattattgaaaatacgtttcaatatataatctaagcacaattacgtagcagtgcctcggacaaacaccgctaagcaaggccataaatttgggcattggcacaacaagacgtgactgttttcacaaaagatgagcgaaatgtgaggcggatcggcatggagaaaaaagggcgtgagcgcagaaaagagagtgaccgaccgtgtacatcccgggattttctgcgctcacgaaagcgtaagttatgcgaccgccgctggctcggcgttaagcgcttccagcagttcaggtaaggtttgatagcggccgacagcggcctgatagcgcccctgtcggctatcttcggcaaccaccgccgtgggaataccggcggcctgagccgcgcaaaagccggtaaagctatcctcaatcaccagacactggctggcgttgagattgagcttccgcagcgtcgtgaggtacaccgccgggtgcggtttgccgcgtggttcatcatccgcgctggagatcgcgtcaaaaaagtgccagagcgaaagcttgttcagcacagcggcaataacctgacgagatgatgacgtggcgagcgcaatcttataacccgcttcgcgaaaatagcgtaacacctcctgcaccccgcgcatcggttcgcctttcgcggcaatcaggcgggtgatgcgctgcaggatggcgtcttcaagccgctgcggagcgagatcaagctgaaaatagcggcaccaggtgccggcaatgtcgtcgaggcgcttgcccttggtcagggtttcacattcagcaacgctcgccgttgccccccactgcgcgagggcgtcaatctgcgcctgacgccacagcgcctcggaatcaataatcacgccatccatgtcaaaaataaccgcctgcatactcattcgttcacctcattaaggctggcatgaagcgcatgccagccgcagtacctatgagaattcaacctgctcgcgggcggttgcttccttgtgggagaaccccggctgctccacgcggataaaggcgcagaggaaaaaggccaccacgtacaatccggtataggcgatcaccaccccgatggtgctgaagaacggcagcagcaccacggcaatcgccggtgcgagaaagttcgacatccccgccgacaggttatagaccgaaatggccgcacctttatgcttcggctccagcgccgggaacacggccgccagcggcacgaaggcggcgacaaagatcccgagggcgatggcggggatcagcgccatcgcaaagctatggccaaagtgctgaggaatgtagtaaaacgccaggctggagagcgccatcccgatgcagccgaaccagcgcaccaccttcatccagccaagtttttccccgaggatcccccacagcacgttagagaaaatggtggtgaagaagaagactgcccatacctggagccattctgaagtgctgaagcccagctcatcgacaaacatcatcggcataatcaccgcaaaaccgaacagcgagagggtattgataatcctcaccatgctcgacagcagaatattgcggttggtatagagcagcgtcgcggcgcgtcccagctcggaaaacttctcacgggtggtgagattctgcatatgctgcggggtttgaatatggcgcagggaaaccagggcaatcacgcccccggtaaggcagaaggccagcgccagccacagggtgcccatttcgccaatgtgcggaatggtaaagctcggaatatagctgccgaagaccccgatgccgatggaatacaccgcccagaaccagccgatggccgagctggcgttgtcgcttttgacgttatggacaatcgccacgataaacgagtagaggaacagcggataggcgaagccgcggatgccgtagaaaagcaggatcagcgcatagttggcgtgaccgaggccgaaaacgaggaacagcacgtggaatacgcaccacagcacgaagccaatcatcatcgttttcagcggggtgataatttccgccaccacgccggaaatccacgccgacagcgcagcggccaggccgtagagggtaaaggcaaaggaggcctccgccggagagaagccgagcgctttgatatagtgcgacagaaaggctaattcaaaaccgtcgccggtcataaatacggcaatggcgatgtatccccagagcaggttcaggggtaaaccgagccactgtttattattgatagacataatgacctcgttttcagggtacagggtggccgctccgcgacgtgcaacgaagcggcggttatgatgaaaatcagtgctgtcgatagtgcagatcgtttaaatacaggcctttaaactgcgcgtagcgttgcatcagggtgtggtggcgaacaggatccgcacgccaggtctgccagacttccggtttttcacacaccgcggcaaccggtttgcccgccgccaggcaggccagccgcgccgcgcccagcgcgccgccggtctctccgcctttgtgggtcaccaccggcatagcgagaatatcggccagcagctgggcccagaacggactgcgggcgcccccgcccaccagcgagcactgcgcgatcggcgtcccgctctctttcaatgcctgcaggccgtcgttgatcccaaagctcaccccctccagcaccgcgtagccgagctgcgcgcgcaggctggcatgggtcatgccccagaagatgccgcgcgcgtcaggatcgttatgcggggtacgttccccggagagatagggcaggaagaacggggcgtgggctttctcctcctcgcttagctcggcaatctccgccagcagcgccacctccgtggtgccggtcaggcggcagaaccactgcaaacagctggcggcgctcagcatgacgctcatctggtgccacaggttcggcagcacgtgacaaaacgcatgtaccgccgactgcggcgccggacgataggcgtcggtcaccacaaacagcaccccggaggtgccgagcgaaataaacgcatctcccggcgagactgcgccgacgccaatggcgctgaccgcgttatcccccccgcccccggccaccatcaccgaggcgttcagcccccagcgcgcagccacctgcgggtcaagggtggcagaaacctcgcagccttcgaccagcgtcggcatttggctacgcgacaggccgcacttgtccagcagagcgtcggaccagtcgcgcttcgccacgtccagccacagcgtcccggcggcgtccgacatatcggagactttcttcccggtcatccggtagcgcagataatccttgggcaacagcaccgtggcggtgcgctgaaagtactgcggctcatgacggcgcacccacaacagcttcggcgcggtaaagcccggcatcgccaggttgcccgccacctgatgcagctccggcgccatcgcctccagctcggcgcactctgcggcgcagcgggtgtcgttccaaagaatggccggacggatcgccttcccctctgcatccagcaacaccgcgccgtgcatctgcccggagaggccaatcgccttaatagccggccaatgctgcgcgcatttttcccgtagcgtggccatcaggtactccgtcgcctcccaccatagctccggcgcttgttctgaccagtgcggatgaggccgctgaatactcagcggcgcgctatggctggcgataacctcatggttctcatcaatgaccaacgctttgacttccgatgtgccgagatcgatacccagatacatagccacctcttaattaatcagcgtgtaaacggcggcgactttctcgcgcatcagcgccaggaaatccgcgttgttggcgagatcaccaaacagggctttatcacgggcgaagacagccaccggatcctgagcctcgaacatctcatgcaccgcctgcgcatccaggatgccgtcctggtactgatacggcagagttcccttgtgccactgctccataaagacgaagaacagcgccggcagcatggcggtcgcttccgggcggacgccgcgctggtagcactcctgcaaggttggcgcgatcatcgccggaattttcgagaagccgtcggcggcgacgcgctggttggtgtcctggatataggggttggtaaagcgcttaagcaccacatcccggtaggtcggcagatcaatgccgttattgccgagacacggaataacgtcctccgtaacgtagcggtcggcaatggcgtagataacatcggtcagcgtgctttcatgaatatactgctggccgattaaggttcccgcccaggcaatgcagctgtgcgacgcgttcaaaatacggattttcgcctcttcatacgggatgaccgactccaccatctccacgccgaccgcctccagattcgggcgggtatcgcggaagttgttctccactacccactggataaaggtctcccccatcaccggcgctttgtcatcaattccggtttgcgctttgatgcgggccggcagatcggccgccggacgcggggtgatgcggtccaccatggtgttcggacaggtggtattggccgccatccagtcaatcaccgcctgtttgccggtgagctgcaggaactcgaccataccgtcgtggaaacgctcgccgttatgacgcacgttatcgcagttgagcagggtcagcggcccggcgttgtcggccatgcgcttttccaggatccgcgcgagggtgccgtaaatggttttgcactcgccttgcaggtcggcctgcagatcggggttgctggtttccagccgatggcgagtgttcaggtagtaccccccttccgtcacggtaaaggcgataactttggtctgcgggtttgccccttcgttaatcagcggctgtagcccggcctgccacggcagcagtttctggattgaggtgatctcttcatattcgcgctccccttccgggctgacggtctcgaggacgtaacgtcctccctgcgccgccagcgcctggaccacctgctcggcgtcgttgcgaatattccccgctgcgatgcgccagcgattatccccggaagcaatcagacgatgcagataccacgcctgatgcgcgcgatgaaaagaacccagaccgatatgaagccatgtgaattgattgttcatgttctgctctccttgagttgatggcgccactgtaattgatcatttgaccaaaataagagccatggatcacaaaagagcaattacccaattaaattacaaatgaccagtaaagagcaaaagcttgccagttatgccaaccacggcgagaatgcgggtattcgccgggccaattgcgtgccctggccagcaacttagggcgggaaaccatgagtaaagaagacgatatccggttggatcagaaggtgcgtgccgcatggatgtactacatcgccggccagaatcagagcgagattgccagcctactgggcacctccagaccggtggtgcaacggctgatcgccgccgcgaaagaagaagggattgtgtcgattaatctgcaccatccggtagcgaactgcctcgattatgcgcagttgctgcaggaaaaataccgcttgatcgagtgcaatgtggtccccgcctttagcgaagaaagcaccctcgacagtgtgtcatttggctgctatcagctgatggctcgctatctgcaggatgataaagagaaaatcatcggtctgggctcgggcctgaccctgaaaaaagcactgcagcgcatcgattttgacagcctgaatacccgctgcgtggcgctgatcagcgccatgaacgccgacgggcagtgcaattattacgatgacgtgcccctgctgctgacccgcaaaattaaggccaagtactatcagtggccggcgccgcgctacgcccaaagcgcagatgagtatgaaatgtggtgcaccaatcgcttattccgcagcgtctccggcgtcgcccgtgaggcggacgtgatttttgtcggtattggtccgctgggcacgcaaagtccgatctttaaagacggctttatcaatcaggcgcagatggatgagctgaccgcccgcggcggcattggggagatcctcgggcggtttattgatgcgcaaggcgacgtggtagacagcgagatcaaccgcatgatcaccagctatgatatccgccagagccactgcccgcggattgccgctgcctgtggagaacataaacgaccggcgatcctggccgcccttaaaggcggctggatcaatggcctggtgaccgatgagcataccgcccgctggctgctgacgcggtaacgtttaacagccagacagcgactcagctgctgctcatcagtcgcgggggaatttcaatccgctgctggctggcttcgccggcgtcaataatcgaaaaaacagcgtccagcatcgccggcacgtcctgctgcaccatgtcgatatcgtgccccagcaggtagacaaacggatcccagtcgaagcagcccatcggcggctgctcgctgccggtcagacccacctgcgacagccagcgcacaaccccttccagggatatcgtcgagttaacaaatatcccctgcaacagcgtcttcgcgctgctaaaccgctcctgcaggcaggcctcaacgtggcctttcgaatagccgggagccagaatattcgcctgcggcacgctaagccccagctcgcgatgcgcatcgtggaagccgcgtaaacgctcactggtgttatggtcgctgctgcgcccgccgataaaggtcagcggcgccagctctccgcggcggcgggcgctattagccaggatcttatgagtcagcgctttcgcgccgccgtagttatccgaaatcaccgacggcgagagagagcccggcaggtcgagattgaccgttggcacgcccgcctgctggcatagcgcggaaattttatccggattggtcgccccggtcgcgaccacccagtcaacctgccaggagagcatcgcctttaccgcttcgatctccagttccggacgccggcgcgtacaggtgataatcggcagcaggccgcgctcgcgggccatctcctcaaagcgttcggcgatggaaccgaagtagcggttatcatatttggggataatcataccgatgacgtgtgattttttactgcgcagcatgctggcctgacggttaatcgcatagccctgctcctcggcaatccgcgtcaccttttccgcaagcttggcgctgatgcggcgctttttccagttaccgttgaggatagcgctcaccgcgctcgccgaaacgccggaaagttccgccaggtcgtaaatcgttatcttcttcatttttccaacttgcgtcacaaaatcatgtcgctgttaatttccccacttgctcaatcgatgaagcgagagcaacatagcttcatcgattgagcatccttttcacgccaggaagtacgcgcgcataccgcctcaacatgccagcaagcctgaattaagatgctgatattcaatatgttaccagttttagtctatcacctcgaacgtgatgccctcgcgttcgatagttttaaccagacacggcaaaggattataaaatgaaccactctgtctcctctatgaatacttccctcagcggtaaagtcgccgcgatcaccggcgcggcgtccggtatcggcctcgagtgcgcgaggaccctgctgggggctggcgcaaaagtggtgctgatcgaccgcgaaggcgaaaagctcaacaaactggtcgccgaacttggcgaaaacgccttcgccctgcaggtcgacctgatgcaggcggaccaggtcgataacctactgcagggcattttgcagcttaccgggcgtctcgatatcttccacgccaacgccggcgcctatatcggcgggccggtggccgagggcgacccggacgtctgggaccgcgtgctgcacctcaatatcaacgccgccttccgctgcgtgcgcagcgtcctgccgcatctgatcgcgcaaaaatccggggatattatcttcaccagctcgatcgcgggcgtggtgccggtgatctgggagcctgtctataccgcgtcgaaattcgcggtgcaggcatttgtgcacaccactcgtcgccaggtggcgcagtatggcgtgcgcgtcggcgccgtactgccgggcccggtggttaccgctctgctggacgactggccaaaagccaaaatggacgaagcgctggccaacggcagcctgatgcagccgattgaagtggcggagtcggtgctgtttatggtgacgcgttcgaaaaacgtcaccgtgcgcgacattgtgatcctgccgaacagcgtggatctctgaccctggccagcctgtgagaggatgtgatgcaaaacgatacgcaaaacattattggcgtggatgtcggttcgggcagcgtgcgcgccggggtattcaatctgcggggcgagctcctcgcccacgcgacccgggaaataaccctgtttcgcagcgccggaaacaaggtcgagcagtcgagccgtgagatctggcaggcggtgtgctactgcattaaaacggcggtggccagcgccggcgtttcgccgtcgtcgatcgccgggatcggcttcgatgccacctgctcgctggtggtgattggcgataacgatgcgccgctggcggtcgggccttcggacgatgcggaccgcaacattattgtctggatggatcatcgcgccaccgggcaggcggaaaagatcaatgccacgggccacccggtactgcggtacgttggcggcaaaatctcgccggagatgcaaacgccgaaaattttgtggctgaaggagaatcgcccgcacatctatcagcaggcgcgccacttcttcgacctcgccgattacctcacctggcgctcaaccggcgatgaagcccgctcggtctgcacggtgacctgtaaatggacctacctggcgcatgaacaacgctgggatgccggttacttccgccagattggcctcgaagagctggcggatgaagattttgtccgcatcggccagcggattgtcgatccaggcaccccctgcggcgagggcctttgcgccacggcggcagaggagatgggcctgccgatcggtacgccggtggcggtggggatgattgacgcccacgcgggcggcatcggcaccgtcggcgtgcttaacggcgcggtcaacaatatggcctatgtcttcggcacttcttcctgcaccatgaccaccactcaggaagcggtattcgtcccgggcgtctggggcccttactattcggcgatggtgccgggctactggctaagtgaaggcgggcaaagcgccgccggcgcggctatcgaccagctgctgagcttccatccggcggcggcggaagcgcgcgagcaagcgaaagccgcaggcgtccctctgccggtctggctggcggatcgcgttctgacgcaagttgcttccccttctgaagcggtaacgctggccgccggtctgcacgtcgttccggagtttctcggtaatcgcgcgccgcttgccgatccccacgcgaaagcgctgattgccgggctggggatggagcgggacctggataacctgaccgcgctgtacgttgccgggctatgcgggattggctatggtctgcgacagatcattgacgcccagcgcgcctgcggaattgagagtgaaaatatcgtcatcagcggcggagccgggcagcatccgctggtgcgtcagctgttggccgacgcttgcggcgttagcatcgtgagcaccgccagccgcgagccggtgctgttaggttccgccatcctcggcgcggtggcgggcagagtcgcggcttcgctgccggaggccatgaagcagtttactcaggtggatgccacctatcacagcgagacggcgtttagcccgcttcatcagcgcaggtatgcggcctataaggcgctacaacaggccggcaggctgattcgcgaataacatacctccttattttataacaataatgctccgctgctatgcagcggagacactcatctgcactctgaaatcgaggtcaacatgtccgttaataacaaacagtggtacggtctaccgctcaacctcatctggggatatgtcgccatcgccgtgtttatgaccggcgacggctttgagctggcttttctgtcgcactacatcaaagcactcggattcaccccggcgcaggcttcctttgcctttactctctacggtctggctgccgccctgtcggcgtgggtctccggcgtggtggcggaaatcattaccccacgtaaagccatgctgattggcttcgtgctgtggtgtgtgttccacgtactgttcctcgtcttcggcctcggtcgcgccaactatgcgctgatcctgctgttttatggcatccgcggcctggcctacccgctgttcctctactcctttatcgtcgccattatccacaacgtccgcagcgacagttccagctccgcgctgggctggttctgggcggtctactcggtgggtatcggcgtgttcggcagctatattccaagctttaccattccccacattggcgaaatgggcaccctgtggctggcgctgctcttttgcgccaccggcggcattattgcgctggtgtcgatgcgtcacaccgaaacgccgcgccatatgcagaacctgaccactcgtgaaaaattcgccgaactggggcgcgccgcgacgctgctctataccaaccgcagcatcctgttctcgagcattgtgcgcattatcaacaccctgtcgctgtttggttttgcggtgatcatgccgatgatgtttgttgatgagctgggatttaccacctcggaatggctgcaggtatgggcggcattcttcttcactactatcttttcgaacgttttctgggggattgtggcggagaaaatgggctggatgaaggttatccgctggttcggctgcatcgggatggcgctttccagcctggcgttctattacctgccccagcacttcggccataattttgccatggcgctggtaccggctattgccctggggatttttgtcgccgcgtttgtgccgatggcggcggtgttcccggcgctggagccgaaccataaaggcgcggcgatttcggtctataacctgtcagccgggctgtcgaactttctggcgccggcgattgccgtggtactgctgccctacttcagcactatcggcgtggtaatagcctataccgccttatatattctggccttcttcctgtgcccgttaatccgcgttgaacagcctggctttaccagcgatcagcatgcgaaaccgtttaccgccaacgcggcagagtcttaataaaccgcatctggtacaaacaatgcgcaatccgggcggtgccgcccggatttttgccttatgcgatagtcactttgccatccagataaacatcctgcacggcattgatcagcttcacgccgtcggccatcgatttcttaaacgctttgcggcccaggatcagccccatgccgccggcgcgtttattgatcaccgccgtgcgcaccgcgtcggcaaggtcggtctccccgcccgccgcgccgccggagttgatcagcccggcgcggcccatatagcagttggccagctggtagcgcaccagatcgatggggttatcgctggtcagtttgctgtacacccggtcgtcggtatagccgaagttaaccgctttgtagccgccgttattctccgccatcttttgcttaacgatatcggcgccgatggtggccgccaggtggttggcctgaccggtcaggtcagcggaaacatgatagtcgacgccgtctttcttgaacgccgaattgcgcagataggcccacagcacggtgaccaggcccagctcatgggcccgctcaaaggcggcggaaatctcttctatctgacgacgcgattgttctgagccgaaatagatcgtcgctcccacggccaccgcccccatattgaacgcctgctcaacgctggcgtagagggtctggtcgtattcggtggggtagctcagcgtttcgttatggttgagcttcaccaggaaagggatgcgatgcgcgtagcggcgcgacaccgaggccagcacgccgtaggtcgacgccacgcagttacagccggcttcgatcgccagctcgacgatatttttcggatcaaagtacagcgggttggcggcaaaggaggcgcccgccgagtgctccacgccctggtcaaccggcagaatggaaaggtagccggttccccccaggcgtccggtattgtacagggtctgcatattgcgtagcaccgccggtggtcggttgttatccaccatcacccgatcaacataatctgcgccaggcagatacagctggtcggacggaatggttatacaacggtgctgcaacaggctctcggcatctttgcccagcaactgcgtaatatcagtcatagcaatctcccgtaaggccggccgaagccggcgtgcattatcccaacccaatttttttgggcaggttaagcctggtaccgacttagcctattttccagccggggggccattttttcaggagattctgctgtcccgttgcgctgccatttaccaccaggcgtggaaatggtgcaccggcccgataccgtggcccacctccagagagtcggcctgcgccagagccgccgacagccaggccttcgcctcgataacggtggccgcccagtccgcgtgacgcgggcgcagcgccgccagcgcggcggagagcgtacagccggtgccgtgggtatttttggtctgcactcgcggcgcggtgaaccgctgttccccttcgcgggtgaagagccagtccgggctttcggcatcgtcgagatggccgcccttcatcaataccgcgccgcagcccagcgccagcagcgcccgcccctgctccagcatttcccgttcgttacgcgcatggggggcatcgagtagcgcggccgcttccggcaggttcggggtgatcaatgacacctgcggcaacaatcgttgacgcagggtctctaccgccgaagccgacagcagcggatcgccgcttttcgccagcatgaccgtatccagcaccacgttggccacccggtagcgcgccagccgctcggccacggcttccacaatatcggtatccgccagcatgccgattttggtggtatcgatacgcacatcgctgaacaccgagtcgagctgcgcggccacaaaatccggttcgatgcgatagaccgactgtacgccgcgggtattctgcgccaccagggcggtgatcgccgagcagccataggcccccagcgcggagaaggttttcagatcggcctggataccggccccgccgctgggatcggtgccggcgatggtcagggcgttgatgcgtttcatccctgcacctcctgatacagcgcgtcgagaaacgccggaataaagctgcccgggcctccctgacgggcggcgatctccccggcctgcttcatcagcccgcaggcggcggccacgttttccagccggtctcccggcagcgccgcgctcgccgccgccaccgccgacagcgcgcagccggtgcccaccacccgggtcatcagcggattgccccccgccacgctgagcacccgctcgccgtcggtgacgtaatccacctcgccagtgaccgccaccacggtagccagccgacgagccagcgcctgggccgccggcagcgccgcagcggccgtatcggtggtatccaccccgcgcccgccggcgctcatcccggccagcgccagaatttcagaggcattgccgcgaatggtcgccggctggagggccagtagctcgtgacaaaaggcagtgcgcacggtcagggcgccgaccgctaccggatccagcgtccagggcttgccggcctgacgggcgtgctccaccgcggcgcgcatcgccacggcgcgatcttcggtcagggtaccgacgttaattaacagcgcatcggcgatagcggcaaactgcgccgcttcgcggggatcgatcaccatcgccggcgaggcgccaacggccagcagaacgttggcggtaaaggtctgcaccacgtcattggtcatgcagtgcacaaggggggaatgggcgcgcagcagatggcgcaggtgcgcgacaggcgcgggattcaacagctcaggcatagtttgctcccgccagacgaggtagaagcaatgaccctgcggtctctgacttccctacgctggcattatccagatcaggtggtacgggtatttctcagccttcaacgaagaagggcaccccgagtcaaaatagtgaaattgttaagcgttgtggaatttaccgcaactcaccggttcatacaacaagcctttagccctggatacgacaccatcgcggccatcatgctcatcaggcgaccggacgggattgcattccgctgctggcgggcggaaaataatgacatcatgcgctatttagcctaccgaggatatacgccatggccgtttatcaccatgcgctggtactgattaacagcagtcaggacggcgtcccgctgctccagcatgccgccagaatggcagaagagaacggcatgcgcatcaccatcgcccacatcagcaccgattaccgggcgctgaactatgtttccgacagcctgcgcgacgatcgggtctcgcaggaggtgatccaggccaaagccctgctcaacgagctggcctgcaccgtctccctgccggtggataccctctcgctggtgaccacccgccggtttgaagacgtagaaacctgcgttcggcagcggcagatcgatttaattattgccggacaccataaccggctgctgggcgtcctctcctcacactcgctggagtacatcaaccacttaaccgtagacgtgctgatcaagcacctgccctagcgcaaggcggcctgcagcagggaaaaacagtcttcaataagcgggggcagcgcctgcgggccgcgcatcagggccactgtgcgggcgagcgccggctgctgcaggtgggcgaccctgagcgcctggtcctgcagatgggtggtgtacagcgccggcagaatcgccaccgctaagcgcgagcgcaccagaccatacagggtttcgatatagtccacctggtagcgggtggtcagcgtcaggcgatggctctccactaatgccgccaccagccgctggatattgcccttcgagaacacagcaatatcccgccccaccagctgtttccacggcagatgcgcctgcgcggccagcggatcgtcgcggtgcagcaccgccacgaagggatcttcgcgcagcggatagaccagcagttctgcgggcagtgagctgtcgatcgccccgatgccgaaatcaatctcgccgcgctgcagcgcctggataagcgcatcgttggtctgatcgtgaaattcaatgcgcagacgcggaaaggcctcagccagggtctgcggcagtagcggaaacagcagcgaactgaccgacggcaccagaccgatacgcaccgtcccgtcgccgcccgcctcgacaatctgctgcatatcggaaaaggccgcctgcgccacgctgaggatccgctgggcgtggggtaaaatcgccgcccccagttcagtcagagtgaccgtcgcagcggtacggttgaccagcttaccgccgagtaccgtttcaatctgccgcagggcgctgctcagcgccggctggctaatcgccagccgactggcggtatcggtaaaatggcgcagctgggccagggtgacgaaatactgaagctgtttaagagagagcgcgggcagccgctgccagggttcgttcatcatcgggttcgctacggtggtcctgcacaataacccgagcttatcgggtgataaatttattcatctgggcaaacgtttgctgtgcccctagagtatccgcattatccttgtgccggagtggttatgtccagcaatgctcaagtccgccgtcgcgccgtgcaggccgcgcgcggtgaatccccgtttgatctgctgctgatcgatgcgcagatcgtcgatatggccacgggcgaaattcgccccgctgacgtcggtatcgtcggcgagatgatcgccagcgtccatccgcgcggcagtcgcgaagacgcccatgaagtgcgttccctggccggtggctacctgtcccccggcctgatggacacccacgtgcatctcgaaagctcgcacctgccgccggagcgctatgcggaaatcgtcctcacccagggcaccaccgcagtgttctgggatccgcatgagctggccaacgtcctcggcgtcgctggcgtgcgctatgcggtggacgccagccgccatctgccgctgcaggtgatggtcgccgcgccgtccagcgtcccctccacgccgggtctcgaaatgtccggcgctgatttcgctggcgaggagatggagaccatgctcggctggccggaagtgcgcggcgtggcggaggtgatggatatgcacggcgtgctgcacggtagcgagcggatgcaggagattgtccaggccggtctcaacagcggcaaactgattgaaggccacgcccgcggcctgagcggcgctgacctgcaggcctacctcgccgccggcgtcacctccgatcacgaactgacctcggcggacgacgcgctggaaaaactgcgcgccgggctgacgatcgagatccgcggctcgcacccctatctgctgccggatatcgtcgcggcgttaaaaacgctgccgcacctctcctcgcagatcaccgtctgcaccgatgacgtgccgccggatatgctgctggagaaaggcggcatcatcgccctgcttaatctgctgatcgagcacggtttaccggcggttgatgcgctgcgattcgccaccctcaacgccgctattcgcctgcagcgccacgatctcgggctgattgccgccgggcggcgcgccgatctggtggtgtttgattccctggagaaactggtggcccgcgaagtctacgtaggcggtaagctgctggcccgcgcgggcaacctgctgacaccgatcgcgcccgccgcgggcgtcacgccgccgcgcgatactttgcagatcgctcccctccgcgccgatgactttattctgcgcgtccagggcattcgtcacggcatcgcccgcctgcgccatatccgcggcgcgcgcttcacccagtggggcgaagtggaagtgcaggttcgtgacgggaaagtccagctacccgccggcttcagtctgatctgggtcaagcaccgccacggccgccatcaggcgacgccgcaaatcgccctgcttgaaggctggggtgagctgcgcggcgccatcgccaccagctactcccacgactcgcataatctggtggtgctcgggcgcgacgctaatgatatggcgctggcggccaaccagcttatcgcctccggcggcgggatggcgctggcgcaacagggcgagatcctcgcccatgtggcgatgccgattgccggcatgctgtcggatctcccggccgcggaactggcgcgtcagttccgcgagctgcgcgatctgagcagccaagtcgccgactgggagccgccgtaccgggtcttcaaggccattgaaggcacctgccttgcctgtaacgccgggccgcatttaaccgatttgggtctgaccgacggcggcagccgccagatagtcgacccgttgatagcctgccgggagatcccggagccaaccgatcacaacaataatcctcagggagcctgagcatggccgataacacacttcactcttccgcccgcgctaactggctggagcgccgctttgcgctgcgctcgcgcggcggcacgctacgcaccgaatgcctggccgggatcaccggctttctcgccgccgcctatttactggtggttatcccggggctgctggcgatcggcgggatggataaaggcgccgccaccaccggcaccattctggtcttcgtcgtcggctcgctgctgatggcgttttatgccaacctgccgtttatcgtcggcccgggcattggcggctcggtgctggtgggggtgacgctggccggtagcgaagggattggctggcagactggcctcggaattgcctgctggtcggggatcctcttcttcctgctgacccgctttggcctgcgcgaagtggtcacccgctcggtgccgcagtcgatcaagctgggattgacggcctccatcggcctgtttgtcgccgtgctcggttttcgcaatgcagggctggcgctggccaatgcgaaaaccaacgccctgatgctcggcgactttctcgtccccggcgcgctggtggcgctgtgcggcctgttcctggcgatagccctgcaggcgcgtaaggtaccgggcgcgattttgtgggctattttgtgcgccacgctggtgggtatcccgttcggcgtgactaaactgccgacgcattttatcgatgccccccactcgctggcgccggtgctgggacaggttgacctgctgggggcgttaaacatcgccttcctgccgttcctgttcgtctttttcgcatctgagtttttctccaccatggggacaacgctggcggtgggcggcgaggcgggtctgctggatgaagaaggcaacatgccgcagattaatcgcccgttcatggtcgattcgattgccgccgcgctcggcccgtgggtgggcattccggcggcgacggcgctgattgaatcttcggcggcagcggaagcgggcggcaaaaccggcctcaccgccctgtcagcggcggtaatgttcctgctgatgctgctgttcacgccggtggcgttgatgatcccgaaagaagccaccgccccggcgctgatcctgattggcctgaacatgttcagcggcctgcgcaaagtggatcttgccaacttcaccgacgggctgccggtgctgatgatggtgatgatcacccttatcgccaacagctttggcaccgggattgccggcgggctgctgttttacattgtgatcaaggctatcgccggtaagtggcgggagatcccgattggcctgtgggtattggccgtcccgctggtgtattacttcgcgaccttagtcaggcattaagcccttcacaatgtgatttcacctcttcatataacaaacgcaccgcggcagagagctgtttgcggtgcggacaaatcagattcaacggcactacatccccctgataacgcggcagcaggcgccgcaggcgccccgcccgcagatcgtcgctgacgtcgagcatcgatttataggcaatgccctccccggcgatcgccagccgacggatcacctcggcgtcgtcgctcatcaccgtgccggaaaccttctgctgctgaaccacgccgtcgaggctcagcgaccagcggtcgaacggacggccgcgcaaaatgtagatcaacgcattgtgctggctgagttcctcgagggtctgcggttcgccatggcgggcgatccactcaggcgaggccaccagcacccgacgattttccggcgccaccggcagcgagataaacgaggcatcgtcgttattgccatagcgaaacgcaacgtccaccggatctttaaacacgtcggtcagctgatcggaaaagagcagccgcaggcgcagcgccgggtggcgttggcggaaatcgcggaacagggtcaggagcaggttacgcccgaggtccgacggcacggcaatctgcaacatgccgcgaacttcatcatccggggtctggatcttctgcagaccggcctcgagggtatcgagcatctgggtggcgtagggcagccaggtctccccctccggcgtcaggcgcaggctgcgggtcgaacgggcaaacaggcgaatattgaggatcgtctccagacgcttaattgccgcgctgacctgcgccggctgctgcccggcctcgcgcgccgcgtcgctaaaactgcccagcgccgcggcgcggacaaataaggtcagatcttccagcctgaacatgccgattctcccctgcttcagattgctcccaaaatacgcatcaccgtcgctgcaacgcaagcggcacaagacttgcgccgcgttttgcttacactttttaaaaatccagtgcttgccatttcagcaacgcatcaggaatgatacgaggctgctattttgagtccaggtaatattgaggaaactatgcgtaaaacaaaaatgatgcttctgggcgtacttcttgccaccgctggcgccagctggacggctactgccgcggggatcgatcagtatgcgctgaaagagttcaccgccgatttcacccagtttcacatcggcgacaccgttccggcgatgtatctcaccccggaatacaacattaaacagtggcagcagcgtaacctgcctgcgccggacgccggcagccactggacctatatgggcggtaactacgtgctgattaccgataccgaaggcaaaatcctcaaagtgtatgatggcgagatcttctaccatcgctgatccgcgcaatctccacgtccgccccggcgagccagcggactctccggcgctgcgccagatcttcctgcgggcgcgcagtttatcgtggacctggcttcccgccgcggcgtggcggctggaagatttcgatgccgccaccgcggatgaacagctgtgggtcgcggaatgcgacggccagccggtgggctttgccgccgtatggaccgccgataatttccttcaccatctgtttgtcgaccccgactggcagggcaaacatatcggcagcgcgctgctggcgcaggtcgaacggacctttaccgccagcggaacgctgaagtgcctgatggaaaataaaaacgccctgcgcttctaccagcgtcatggctggaccattgaagcacagggcgcgtcgcccgagggcagatactggctgatgcgctcgccgcggccttaaacggcgcggaaggcaatctcaccggggatcacttctccctgccagtacatctgggccgccacccggcccgccagctggcggtagatgtcggtaaattcgctgtccggacgcgccaccaccgtcggcgtgccgttatccagatcttcccgcagcgtaatatgcagcggcagctggcccagcagctgggtgtggtatttctcggccagtttttgcgcgccgccggtgccgaagataggctcgtggtgcccgcagttgctgcagatatgcatgctcatgttttccacgatccccagcaccggcacttccactttctcgaacatcacgatgccttttttggcgtcgatcagcgcgatgtcctgcggcgtggtgaccaccaccgcgccggtcaccggaatgttctgcgccagggtcagctggatgtcgccggtgcccggcggcatatccagcaccaggtaatcaagatccggccacagggtctcctgcagcatctgcatcagcgccttgctggccatcggcccacgccagaccatggcgttgtcgtcggtcaccaggtagccgatggagttggttgccagaccatatttcatgatcggcgccatatgagtgccgtccggcgaggtcgggcggctgtcttccgcacccagcatggtcggaatcgacggaccatagatatcggcatccagaatgcccaccttcgccccttccgccgccagggccagcgccaggtttacggcagtagaagatttaccgacgccgcctttgccggagctgatggcgataatgtttttcacgccgttgaccccgggctggtttttcacccgtttgagggtcgcgatgctgtgggtcagcttccagtcgatggccttcgcgccggtgatgcgcagcagttcggcgctgcactgctctttcagcgcttcgaaagcgctgctccagacgaacggcatttgcagttcaatatggacggtatcgtccagccaggcgacatggtgcagcgccttaagggcggtgagattatgcttcagggttgggtgctggaaattggccagcgtcccggcgaccatcgcacgtaggcgctcaggggatttggcctgggattgcgaattcatcccgactcctttgttgttttgagatgctttcagtaatcacagagtttatcacaggtaacgattatccatatatgggcagccatttatggcgcacccacagcccttttggtaatatcggaagccctttttacaacagaagatgtaatgctcactatgactcaagtcgcgaagaaaattctggtaacgtgcgccctgccgtacgccaacggctccatccacctcggccacatgctggagcacatccaggctgatgtctgggtccgttaccagcgaatgcgcggccacgaggtcaacttcatctgcgccgacgacgcccacggcacgccgattatgctcaaagcgcagcagctcggtatcactccggagcagatgattggcgaaatgagtcaggagcatcagaccgatttcgccggcttcgacatcagctatgataactatcactcgacgcacagcgacgagaaccgcgagctgtcggagcttatctacacccgcctgaaagagaacggttttattaaaaaccgcaccatctctcagctctacgatccggaaaaaggcatgttccttccggaccgttttgtgaaaggcacctgtccgaagtgcaaatctccggaccagtatggcgataactgcgaagtgtgcggcgcgacctacagccctaccgagcttatcgacccgaaatcggtggtctccggcgccacgccggtgatgcgtgactccgagcactttttcttcgacctgccgtcgttcagcgaaatgctgcaggcgtggacccgcagcggcgccctgcaggagcaggtcgcgaacaagatgcaggagtggttcgaatccggcctgcagcagtgggacatctcccgcgatgcgccgtacttcggcttcgaaattcccaacgcgccgggcaaatatttctacgtctggctggacgcgccgatcggctacatgggctccttcaagaacctgtgcgacaagcgcggcgacaccaccagcttcgacgaatactggaagaaagactccacggccgagctgtatcactttatcggcaaggacattgtctacttccacagcctgttctggccggcgatgctggaaggcagcaacttccgtaagccgactaacctgttcgtgcacggctacgtgacggttaacggcgccaaaatgtccaagtcgcgcggcacctttatcaaggccagcacctggttaaatcatttcgatgccgacagcctgcgctactactacaccgccaagctctcttcgcgcatcgatgacatcgacctgaacctggaagatttcgtgcagcgcgtgaacgcggacatcgtcaacaaggtggttaacctcgcctcgcgcaacgccggctttatcagcaagcgtttcgacggcgtgctggccgctgagctggccgacccggcgctgtacaaaaccttcaccgacgcggcggaaagcatcggcgaagcatgggacagccgcgagttcggtaaggccatccgcgaaatcatggccctcgccgacgtggctaaccgctacgtcgacgagcaggcgccgtgggtggtggcgaaacaggaaggccgcgacgccgacctgcaggccatctgcaccatgggcctgaatatgttccgcgtgctgatgacctggctgaagccggtcctgccgcagctggccgcgcgtgcggaagcgttcctcaacagcgaactgagctgggacgccattcagcagccgctgctggcgcataaggtgaatccgttcaaggcgctgtacaaccgtatcgagatgaagcaggtggaagccctggtagaagcttctaaagaagaggtgaaagccaccgcggcgccggtcaccggtccgctggcggacgatccgattcaggagaccatcacctttgacgatttcgccaaagtcgatctgcgcgtggcgctgattgaaaacgcggaattcgtcgagggctccgacaagctactgcgcctgacgctggatctcggcggcgaaaaacgtaacgtcttctccggcatccgctccgcctatccggatccgcagccgctgattggtcgcctgacggtgatggtcgccaacctggcgccgcgcaaaatgcgcttcggcatctccgagggcatggtgatggccgccggccctggcgggaaggatatcttcctgttaagccctgacgacggcgccaagccgggtcagcaggtgaaataacaaaaaagccggagagtatctccggcttttttttgcccggcggcgctatgctagcacgcgcccgggggcagtcgttgtaggccgggtcaggcgaagccgccacccggcaaaaaatcatgccttcgggttatgcacccgctgggtcagtccgcgcaggaaattacgcagaaactggtcgccgcactcgcggtagtttttgtggtcaggcgagcgcatcatggcggtgatctccggcaccgacacccggtatttctgctcgctcataatcgcctggatatcgtccgttttcagcgagaaggcgatccgcagctttttcagcaccgtgttgttattcacccgacgctccagcgccagctccggggccgaatcatctttgccgcgcttgtcatagataaggccgttaaggaaacccgacaggataatgtccgggcagcgaacaaagccctcttcatcctctttcgtcgtccaggtgtcgaagctggcggcggtggattccatagcggagagcgcgagaatgcgcaccatatcgttattattgactttcagggtgtagcgcaggctacgaagaatatcattactgagcatgagggccttttactgtcgatgatgcaatggggcgcagtgtaccagctttacaggccaatcgcctctttcaggctttttaaatagcgccggctcaccggcaccgtttgcccggcgcgcatcagcagctccgcctggccattctcctccaggcgaatctccttcaggtgcgccatattcaccaggtactggcgatggcagcgcagcaacggcgtgcggctctcaagggtgcgcagggtcagttcggtaaagccctcttttccctcgcggtcggtcacgtagatgccgctcatccggctgctgacgaaggccacatcctccatctgcagaagccagatacgactgtggccggtacagggaatgtatttcagcgtctgctgagcatcatccagcagcgacacatcctgcagattacgctcctggcgcaggcgggcgagggttttctccagccgggcagcttcaatcggcttcagcagatagtcaaaggcatgctcctcaaaggctttcaccgcgtattcatcaaaggcggtgagaaacacgatataggggcggtgctccgggtcgagcatcccgaccatctccagaccgctgatgcgcggcatctggatgtcgagaaacagcacgtcgggacgcagcttatgcaccgcgccaatggcctccaccgcgttgccgcactcgccgacgatctcgatatcgcgctgtgtctccagcaaaatgcgcaggttttcccgcgccagcggctcatcatcgatgatcaatactctcagcatgcattctcctccaggggcagacgtagggtgacacgggtaaagcgctccggctcgcaggtgacgctgatgccgcagtcggcgccaaaacgcgcccgcagccgcctgtccaccagattcatccccagcccgctggcctgggggttggcccggtacagcccggcgttatcttcgatatccagctgcagccagcgatcgtcctggctggcgcggatggtaatttcgccgacgccaagatgttgcgatgtaccatgcttaatggcgttctccacgatcggctgcagggtaaaagccggcagctggtgatgcgccagcccttccggcaccgccatctggatctgcaggttagcctgaaagcgagccttctcaatctgcagataggcgttaacatgctcgatctcatcggcaagagtgacaatttccgtcggccgtttcaggttcttgcgaaagaaggtcgacagatactgcaccagttggccggcctgatcgctgtcgcggcggatcaccgccttcagcgtgttaagcgcgttaaacaggaagtgcgggttgacctgggcgtgcaggagcttgatttcggattgcgtcagcagcgccttctgccgctcgtactgtccggcgaggatctgcgccgacagcagctgggcaatcccctccccgagggtgcggttgatcgaactgaacaggcgatttttcgcctcatacagtttaatggtgcctatcacccgttggttctcgccgcgcagggggatcaccagcgtcgaccccagcttacagtgcggatgaatcgagcagcggtaaggcacctcgttgccgtcggcgtagaccacctccccggtctcaatcgcccgttgcgtatatgaggaggagataggcttgcccggcagatggtggtcgtcgccgatgccggtaaacgccagcagcttgtcgcgatcggtgatcgccaccgcgccgatgtccagctcctggatcagcacctgggccaccttcatgctattctcttcgttgaatccctgacgcaggatcccctcggtggacgccgccaccttcagcgccgtggcggaaaaggcggaggtgtacttctcaaacatcgcccgcttgtccagcagaatgcgcataaacagcgccgcaccgacggtattggtgaccatcatcggcgcggcaatgctctgcaccagatgcagggcgtcctggaacgggcgggcaatcagcagaatgatcatcatctgcaccagctcggccacgaaggtgatcgccccggcggtcagcgggctaaagactttgtccggccggccgcgtttgaccagcacgctgtgcaccagaccgcccagcagcccctcaacgatggtggagaccatgcaacttaaggcggtcattccccccagcgagtagcggtgcaggccgccggtgagccctaccagcccgccgaccaccggcccgccgagcaggccgcccatcacggcgccgatggcgcgggtgttggcgatggagtcttcgatatgcagaccgaaataggtccccataatgcagaaaatggagaaggtgacgtagcacaacagcttgtgcggcaggcgaacggtgacttgcatcagggggataaacagtcgggttttgctcatcaaccacgcgatgaccaaaaatacgcacatctgctgaagcagcagcaacaccagatcaaactcgtacatacccgcaaaccacacatgcctgaaagcgcgtaccataccctgcctggcgaaaagtttctttgaagccctgcataaaaatgaaaaatgacggccaggatcacacttttttgcggcgcgttgcgcagcaaacgcggcaaaaaccccggcgcggcgcgctaaaccgcaattaatgtttcattaacacctgcgcttcaccgtataatccccttgttaacatcaggagcctattatgaagccagcgaaaatcgcggtcgtcactctcttcttacttatggccatcggcgggatcagcggcgtaatgctggccggctattcctttattgtgcgtggcggtgtcggctgatccagcgggtcagacgttcaaacgcgcggtcgacgataatcgccgccagggccaccagcagcgccccctgtacaatataggcggtattaaagccgctcaggccgatgatgatcggcgtcccgagcgtactggcccccaccgtcgaggcaatggtcgcggtaccaatattgacgatgaccgaggtgcggatccccgccaggatcaccggggccgccagcggtagctccaccttatacagacgctgccagccggtcattcccatcccttcagccacacctgacacccccggcggtatcgaacccagcccggccagcgtcccctgcagcaccggcagtatgccatacaacgcgagggcgatgagcgccggcagccagccaaagcccagcaccggcaccgccatcgccagcaccgccaccggcggaaaggtctgcccgatagcggcgatggtctccaccagcggacgaaacgcgctgccggcgggccgggtgaccgccaccccagcccccagcccgattgccgttgccgcgaggctggacgccaccaccagccagccgtgatcgagagtgagcgcccagaagctctcctgctggtagaccggccgcggcagttccgggaacagccgactgaacagcggcgcgctgtagggcagccctgccagcaggccgataaacagcgcgataagccaccacagcggctcacgaagcgccttcatggctcatctcctgacgcagcagatcggcaaaatgcagcgtaccgcagggcctgccttcggcatcgaccaccggcagcgtctcgcagcgccgggcgacaaactgcgacagcgcttcccgcagggtcatggtgatggtcagcccctcgcccgccagccgttcgtcgggacgcaaatagtcccccacctcgcgcagcgacagcaggcgcacacccagctcgctgcggccaaaaaaggtctgtacaaagctatttttcggtcgcaggagcatctccagcggcgccccctgctggaccacctcgcccccgtccatcagcaccaggtggtccgccagacgcagcgcttcgtcaatatcatgggtcaccagcacaatcgtccggcccagcagacggtggatgcgcagcatctcctgctgcagcgcctcgcgggtcaccgggtcgagggcgccgaagggctcatccatcaacagcacctccggatctgccgccagcgcccgcgccacccccacccgctgctgctggccgccggagagctgatgcgggtaacggtcgcgcagcgtcgcctccagccccagcagcgccatcagctcgtcgatccggtcggcgatccttgcccgcggccatctttgcaactgcggcacggtggcgatattctgcgccaccgtccagtggggaaacaggccgatggactggatggcatagcccatccgccgccgcagggtcaggaccggctgctggcgaatgtcctcgccggcaaagcgaatggtgccccggtccggctccagcagacggttgatcatcttcagcgtcgtcgacttgcccgagccggaagtccccaccagcaccgagaaagcgccttcgcgcagctccagggtcaggtccttcaccgccgggtggccggcaaacactttgctgaccccttgaaattcaatcattggcctctccttttagccaggcgccccacagggcgaacagggcatccaccaccaccgccagggcaatggtcggcaccacgcccagcagcaccagatccagcgcactgctcagcagcccctgaaaaaccagcgcgccaaagccgccggcgccgatcagcgcggccactaccgccatgccgacggtttgcacgctgaccacccgcaggctgcgcagcagtaccggcatcgccagcggaagctgcacctgacgaaagcgctgcccggcgctcatgcccattgccgtcgcgctttccagggcatcctgcggtacctgctgcaggccggtcaccaccccgcgcaccagcggcagtagcgcatagagagtgagagcgatcagggctggcgccacgccggtcccggagacgcccagctcgcccagcgtcgggaaataacgcgccagaccggcaagcggcgcaatcagcaggccaaaaagcgctaccgacggaatagtctggatcacattgagcgcggtgaaagccggcgcctgccagcgcggacgccgccacagccatacccccagcggcaggccaatcagcaggcccggcagcagggtgccgaacagcagaagcagatgctggcgcagggcgtcatcaaatacctcctgacggttggcatactccttcagcaaggagagctgatcgagcgccccgatagcgagcaggatgatgggcaacagccagacttgcgcattgagcagccagcgccagagcggccggacggtaagatgacggatggcctcgctggccagcagcagacaaagcgccagcgacaaccacaggccgctgccgggcgaggtgcgcgccagcggcgagccgtggcgggagagctcaagcgccgcctggccgctgccccagataagcagcgggaagagcagttcggccagcagcaggtggagaaacggcacgatcctgcccggcagccagcagagcagcatcccggcaagggccgccgccagctgaacgccggcgagccagggcagcgcctgccacagcccgcgcccttccccggagagtaagcgattcggcgcataagtgacaaacggcagcgccagcgtaaccagcagcagacctgtcagcagcaggccgacgcggtgagtacagcgaatggtcaccggtggcttacttcagcaggcctttctgctgcagataatctgccgccacgcgcttcgcatcctggccctccaccgcaatgcgggcgttcagctgctgcagcgttttttcatcgaggctggcgaagaccggctgcagccagtcggcgatctgcgggtaggccttcagcaccgcctcgcgcaccaccggcgtcggggcatatatcggctgcacgccctgcgggtcgctcagcgtctgtaaccccagggccgccaccgggccatcggtgccgtaggccatcgccgcgttaacgccggaggtctgttgcgccgccgctttgatggtcaccgccgtatcgcccccggccagcgacagcagctggttctggttgaggttgaagccatacgctttttcaaacgccggcagcgcgtccgggcgctcaataaattccgccgaagccgccagcttaaattcgccgccctgcttcaggtagcgactgaggtcggccagcgaggtcagcttatttttctccgccaggtcctggcgcacggcgatagtccaggtgttgttggccggcgccggggtgagccataccagctgatgtttctcctgatcgaggcgcttcaccttctcatagccctgttgggcattcttccacgccgggtcgttttcatctttgaagaagaaggcgccattgccggtatattccgggtagatatccagctcgccggcgacaatcgccccgcgcaccaccggcgtggtgccgagctggattttattaatcgtttttacgccgtggctttccagcacctgctggatcatattgcccagcagcgcgccttcggtatcaattttcgagccgaccttcaccggctccgccgcctgcagcggtaaacttatcagggcggccagcgccagcgcgccggaccatgtcgttgccatcttcatcccgcatccctcagttcttttgcgcttcgcttacagaagcttaagagaaaagcgtagcccatttgccagcgatgcgaaaaagaaaaggccgattaatcggcctttaaagcgtgacgttggacttaagagcgataccttacagcagctcaaactcgctctgcttcacgcgggcggagtccacgccgataaagacattgaatttgcccggctcagcaacgtatttcatttgctgattccagaacttcagcgcgtcgacgtcgattgggaagctaacggtttgcgtttcgcccggtttgagggtgacctttttaaagccgcgcagcattttcaccggccggctcatggaggcggtgacgtcctgcaggtagagctggatcaccgtcgccccttcgcgattgccggtgttggtcacctgcacgctggcggtcacgctgccatcgcgcggcatggtggccgacgacatgttgacatcggagacgctaaaggtggtgtagctcaggccgtaaccaaacggatacagcgggccattggcttcatcgaagtaacgcgaggtgtacttgttcggcttctccggattatacggccggccggtattcaggtggctgtagtaggttgggatctgccccaccgagcgcgggaaagacatcggcagcttgcccgacgggttgtagtcgccaaacagcacgtcggcgatggcgtggccgccttcggtgccagcaaaccaggtctccagcagcgcatcggcttgctgatcctctttcaccagcgccagcggacgcccgttcatcagcaccagcaccagcggtttgccggtggctttaagagcggcaatcagattgcgctggctctgcggcagggtgatatcggtccggctggaggcctcatgcgccatgccctgcgcctcgcccaccacggcgaccaccacatcggattgcttcgccgccgcgaccgcttcgtcgatcatttcctgcggcgagcgtgggtcaacctgcaccgcgttctcatacaaattgaggaaatcgacaatgcctttgtcatcggtaacgttcgcccctttggcgtaaatcactttgccgttatcgcccagcgcttctttgatgccggtcaggacggtcaccgactggtcggccaccccggccgcggaccagctgcccatcatgtcgcgcttgctgtccgccagcgcgccaaccaccgcgatagtgccggattttttcagcggcagcgtatcaagacggttcttcagcagcaccaggctctcgcgagccacttcgcgcgcctctttacgatgcagacgactttccgcattggtgtcctgcgggtcagaatctttcggtcccaggtggctgtagggatcgttgaacagtcccatatcatatttcacgttgagcacgtgtcgggtggcatcatccagctcggccatggtcaccttgccggacttcaccagccccggcaggtacttgctgtaatactcgtcgctcatgctcatgttgatgccggacttcagcgctacgcgcaccgcgtcttccgggtcggaggccacgccgtgcttaatcaactctttgatggcgccgtggtcggaaacggtgatgcctttaaagccccactggtcgcgcaggacgtctttcagcagccaggaatcagaggtcgccggggtgccgttcagcgagttcagggctaccatcaccgcgccgctgccggcatcaagcccggctttgtacggcggcatatagtcgttgaacaggcgctgcgggctcatgtcgaccgtgttgtactctttcccgccctctaccgcgccgtaggcggcgaaatgcttgacgctggtcatcaccgaatagcggtccgccgggctcttgccctgcatcgactccaccatcgcctggcccatcatcgtggtcagataggtgtcttccccgaacccttcggaagcgcgtccccagcgcgggtcgcgggagacgtcgaccatcggcgcccaggtcatgttcaagccgtcatcggcggcttcataagctgacacgcggcccacggtcttcaccgcatcaaggttaaacgacgaggccaggctgaggcttatcggaaacacggtgcgctgaccgtgcagcacatcgtaggcaaagaacagcgggatcttcaggcgactaagctgcatcacctgatcctgcatcacacggatatccgggcgggtaacggtgttaaaaatcgcccccacctgaccgttcttgatcatttcacggatcgcctctttcgggttatccgggccaacgcttatcagacgcagctggccgattttctcgtccaccgtcatttttttcagcaggtcggtgacaaaggcatcccgcgcctgcggggtcagggggtggttaccaaacagttcatccgccagcgcgggttgcagcgccagactcacggcgacgcctacagtgcagagccatttcattgttatctcgctttatctcagacggggactcggtaaaacataataaaaaccgcagtttgccatatatataaacaacgcgcccgcagaatgctaaggttcttctctgatttttgcgaaacattcatgcatcaaattgtcatacaaagcgctatgcttatcctcgatatttcgcgcaccaccacaaggagtggaacatgtcatctgcacccactgacacccataaaacgtttctggctgacctggcgcgcctggttggcccttcgcatctgctgaccgacccggcaaaaacccagcgctaccgcaagggcttccgctccggtcagggcgaggccctggcggttgtctttcccggtaccctgctggagctctggcgcgtgctcaacgcctgcgtagacgccgataaaataattctgatgcaggcggccaacaccggcctgaccgaaggttcgacccccaacggcaatgattacgatcgcgagatcgtgattatcagcaccctgcgcctggacaaactgcatctgctggacaaaggcgagcaggtgctggcctggcccggcaccaccctctattcgctggaaaaagcgctcaaaccgctgggacgcgaaccgcactcggtgatcggttcgtcatgcatcggcgcatcggtcatcggcgggatctgcaacaactccggcggctcgctggtgcagcgcgggccggcctacactgagatgtcgctgttcgcgcagattgacgccgacggcaagctgaagctggtcaatcatctgggcatcgatctcggcagcacgccggagcagatcctcagccgcctcgatgacgaacggattagcgatagcgatgtgctgcacgacggccgccacgcccacgatcacgactatgtcacccgcgtgcgcgatgtcgatgccgacaccccggcgcgctataacgccgacccggaccgcctgttcgaatcctccggctgcgccggcaagctggcggttttcgccgtgcgtctcgatactttcccggcggaaaagcgccagcaggtgttttacattggcaccaaccagccgcaggtattgaccgagatccgccgccatatcctcgccgagttccagcatctgccggtggcgggggaatatatgcaccgcgatatttacgatatcgccgagaagtatggcaaagacaccttcctgatgatcgacaagctcggcaccgacaaaatgccgttcttcttcaccatgaaggggcgcaccgacgcgatgctggagaaagtctcgctgtttaagccgcactttaccgaccgctttatgcagaaactcggccacgtctttccggcacatttaccggagcggatgaaaacctggcgtgataaatatgaacatcatctgctgctgaagatggctggcgacggcatcgaagaagcgcagcgttggttgacggagtacttccagcaggccgagggggatttcttcgcctgtacgccggaggaaggcagcaaggcgttcctccatcgctttgccgccgccggcgcggcgatccgctatcaggcggtgcatgccgacgaagtcgaagatattctggcgctggatatcgccctgcgccgtaacgataccgagtggttcgaacatctgccgcccgaaatcgacagccagctggtgcataagctctactatggccactttatgtgccatgtgttccatcaggattacatcgtcaggaaaggggtcgacgcccacgcgctgaaggaaaaaatgctggagttactgaaagcgcgcggcgcccagtacccggcggagcataacgtgggtcatctgtatgaggccccggagagcctgcagcagttctatcgccagaacgatccgaccaacagcatgaacccggggattggtaaaaccagcaagcagaaatactggggtgaagcggccccgacgccagcctctccggcggatccgcaataatcgacggcaggactattcagcctggcgcttctgtattacgctgcacgccggagaatgtttctccggcagattcaggagcgccgccatgcccgcagaggccccgttactcgacagtgatttagaaattcgcgaagcgctgcccgacgatgcgcacgccatcgccgcgctgtatgtctggcacgtacttaatggccgcgcctccttcgaagagatcccccccaccgttgacgaaatgcgtaaacggatccagaccgtgcgcgacaacgggctgccgtggctggtagcgctgtggcgcggggctatcgtcggctactgctatgccactttctatcgcccgcgtccggcctatcgctacaccctcgaggaatcgatatacgtggaatccggaatgggcggacgcggcatcggcagcgcgctgctgtccaggctaatcgctgagtgcgagaaaggcccgtggcggcagatgctggcgatcatcggcgatggccataacaatgccggctcgctggcgatccataaaaagttcggctttaccgtggcgggtcagctgcgcagcgtcggctacaagatgggcgactggcgggatacgttgattatgcagcgcgcgctgggtgacggcgactggacgctaccggagtgatatccggcgccaaatccccggctcgcggcgtaaacgccttagccgggctaccgttcagcgcggttccggagaggcgtcagccgccatcctgcacaaacaccggcactcggcctgattgcccggcggcgctgcgcttgccgggcctacgaaaggggcgaacccggcgccaaatcacgtagcccggataaggcgcaatgcgccgccatccgggagacatgcagattaatcgttctgcgcggtctgcgcgccgcctttcagcatcgcctccgccatctgcgcttcgcgctgctttttatagctcagcgccgaggcgggtaccggcatcaccttcccggtttcaatccaggtccgcaagcggctggcgtcagcgaagtgggtatatttgccgaaggcatccatcaccaccagcgccaccggacgttggttaatcaccgtgcgcataatcaggcagtggccggcagcgttggtgaagccggttttggtcagctgaatgttccagttatcgcgatacaccagatggttggtgttgcggaacggcaggctgtaggccggatgggcgaaggtggcggtctcttctttggtggtgctcagctggccgatcagcggatactgctcgctggcgatcagcagtttggtcagatcgcgggcggtggagacgttatgcaccgacaggccggtgggctccacgtagcgggtatgggtcatgccgagcgcctgggctttggcgttcatcgcgcgaataaaagcgtcgtagccgcccggatagtgatgcgccaggctggcggccgcgcggttctcggaagacatcagcgccagcagcagcatatcgcggcgactaatctggctgttgaggcgcacgcgggagtagatccccttcatttccggcgtatggctgatatccaccgtcagcatctcatccagcggcagatgggcatcgagcaccaccatggcggtcatcactttggtgatcgacgccatcgggcgcaccagatcaggctggctggcataaatgatttttttcgtggccagatcgacgatcatggcgctgccggaggcaatttccggctgcgaggcggtcaccgccgtcggggtttttgctaacgcctggggcgcaaaaggcacagccagcagcaaggtcaggctgagcaaagagactcgaaatttcggcatcatgggcattctgaaaagtatttttgcacgttatggaacgtacgccgcgaggttaagtgggcaacttcgctggcaaacgccatcataccgcgccgtaaggccctgtgcctaataagaatcgtgaagaaatgctgcattgccgacataaaatacatatttgccggcaatgcatatttacccgtgacgtccgatcagaagagtcggtagccatacccccacagcaccacggtgatggccagcagcacttccagcaccagtaccccaatagctagcgtcgagctggcaaagcttaacccctcttcccgattaatgctcaggaaggtcggaatgccgagatacagcagatacccggtatagaacagcgcaatagtaccgaccagcgcgcacagccagaccagcggatagagcgccacaatcccgctcagaaacagcggggtggcgacgtagccggcaaacaccatgcagcgtttcagggaaggctgctgcggatactgcctcgccatccaccagatgacccgccccatgatcgccaccccggcaagcatcacggcgtaaaacagcaccgccagcgccagtccggtcagcatcgacagtttaatcacggtgccatcgccgaagttccagcccagctgcgtggtgccgataaaggcgcagactaccggaaccgccgccatcagcagcacatgatgcgtatagtgatgagaaatggtttcattctcgctcttaatcacgctcatttcccggttgggatgagcgaagagcccccagacatggttcatagcgtcccccttgtcacggcttcgtactgcactgatccaagtataattcaccctgtagattattttatgtacagcacagaaaattctgcgtcgccgcgttttggtcagcagggtgtatgattaagaggtgatgaggtaaggagaaaagctttttatggatatcaatcacctgatttcccagtatggctacgcggcgctgatcgtcggcagcatggcggaaggtgagaccattaccctgctgggcggcgtcgcggcgcatcaggggctactgaaatttcccctggtggtgatcgccgtcgccctcggcgggatgattggcgatcagctcctctatctggtcggtcgccgcttcgggggacgcatcctgcgccgtttcgccagtcagaaagcgcggatccgtaaagcgcagcgtatgatccagcaccggccgtggctgtttgtcatcggcacccgctttatgtatggcttccgggtaatcggccccctgctgatcggcgccagccgcctgccgccgcgcattttcctgccgctgaatattgtcggagcgctggtgtgggccctgctgtttaccaccattggctatctcggcggcgaggtggttggcccgtggctgcatcatctggacgcccatctgaagcactggatctggctgatcctcgcggtggtggtggtggtggccgcccactggtggctcaggcggcgcgagagtaagaagaaagattaagcggcgcgcccgcgggcgcaccgtggttggcggttacttcaccgtctggtggtagccgccgccgagggccgaggtcagctgaatgctagcgtcaatccactggccgtgcaggcgcaatgcggtgatccgttcctgcagcgccgggagcttcgccatactgattctggagccaggtaagatccccgccgccattcgggcctgcgccagatctactacccgctgagcgtctttttcaacctgctgctgctgctggcttttggccattaatgtttcgacctggctggcggttttcgccacctggttaacggcatccaccaccgctttgttgtactgggcgatcgacaggctattctgcgcgctggcgatatccaggttggcgttaaggcggccgctgtcaaagatcggcagcgtcaacccggcagtaacgcccatctgctgcgccgaatggcggaaaagatcgcttaagtgcagggcatcctgctgcaggaacgccatcagattgatgtccggataaaatgccgctttcgccgcgtccacttcgctcagggacgcctcaatataccagtgggcgacctgcagatccgggcggcgcgccagcagctcatagccgagggtatctggcagctgcgcgctgaccgttggcaggctggcgggtttgaggtttagcgactggctctggctgttggtcagggccatcagccgcgcttcaatctctttcatcgtgcccgtcacgtccgccagctgctggtcggttttgctgacgttaatatcgttctccgccccttcggcggagttagtgatcccgcgctgatacagggccttgtcgaccgtcacgatattattttgctcgtttttcacctgctgcagcaccgctttgatcgccgcttccgtctgccactgccagtacagacgcgccacgctgccggagagcagctcacgggtctgggcctgttcagcaacctgggctttcagctcgccgatacgcgctttcaccagcgcacggttttttccccacagatcgagatcccaaccggcggtcaggccaaaggtaccgttggtgtaccacgggccggtattgccgtcggtgtcggtagcaaacggtcccatcaggccttcggccgacatgcgctggcgttcaatatcggcggagaaatccatctccgggccaagattcgcctgcgacattcgcgcctgcgcttcggcaagcctgatgcgctgttcggcaatctgcatatccggcgcgttggccaacgctcgctgaatcagattattaagctgtgggtcatggtaatctttccaccagtcagtctgcggccagccatttttcacggcggcagggagatccatggaaacatgggaggccggaatttgctgctgcggcggattagcaacctcatgagatggcgcgcagccagccagcgcgatggccaggggcaatgccgccagcacgcttttatttaatatcaatttcattggacaggtcagataacttaatcaggttggttatcataagttaattgaattaaacgcgtttagtaaagcgtgtgactaaattattagtttgctaaaaataaacaaccttatcaattcagggggtgaatatgagccggcatcttttaacgagccgcacctcttttccaccctgcccgctctggatgaagagaaagaacgtccgatgacctttttactgcgcgcgcgtaaaccgggctaaccccccgcccggcgatggccgggcgggcattctttaggctttcaggctggcgccgcggctggcaatcacctctttataccagctaaagctcttcttcttactgcgcgccagggtgccggtaccgtcatcatggcggtcgacatagataaagccgtagcgcttcgacagctccgcctttgaggcgctcaccaggtcaatcggtccccagctggtaaagcccatcagctcaacgccatcgtcaatggcttcccgcgcctgcaccaggtggtcgttcaggtaactgatgcggtagtcatcgttaatgctgccgtcggcttccaccttatctttggcgcccagaccgttttccacgataaacagcggcttctggtagcgatcccacagcacgttcagcagcgtgcgcaggcccagcgggtctatctgccagccccactccgagctcgccaggtgcgggttcggcaccatgctgagaatattgccgcgcgcctgctggttcagcgcctcgtcggcggtgacgcagccggtcatgtagtagctgaaggagataaagtcgacggtggtttttagcgcttcacgatcggcgtcggtgatggtgagcgtgatgccgttgtcacggaaatagcgctgcatatagcccgggtacgcgccgcgcgcctgtacgtcgccgaagaactgccagctgcggttctcctgcagcgtctcaaacacatcctccggtttgcagctcaggggatacatcagcccgccgagcagcatattgccgattttgccctcaggcaccagctcatgacaggctttgaccgccagcgcgctggccaccagctggtggtgaatcgcctgatacacctcgcctttgctgctgccggccggcaggccgacgccggtcatcggggcatgcagcgacatattgatttcgttaaaggtcagccacagtttgaccttatttttatagcggctgaacaccgtccgggcgtagcgctcaaagaagccaatcacctcccggctgccccagccgccgtagttttttaccagcgcccatggcatttcataatgcgacagcgtcaccagcggggtgatgctgtgcttcgccatctcgtcgaacagcttgtcgtagaacgcgaggccggcttcgttcggctcggcgtcgtcgccgttggggtagatgcgggtccaggcgatggagactcgcaggcagttaaagcccatctcggcaaacagggcaatatcttccggatagcgatggtaaaaatcgatcgccacatcttttatgccgctgtcgccgggtacgcgctcgaccacttcgccgaacacgccgtgcggctgcacatcggaggtggataagcctttgccatcttccagataagcaccttccacctgattggccgcggtcgcgccgccccataaaaaatccgtcgggaatgttttcatctttttctcctgtgattaatggctgactgacaacagcggctgaccggcttcgacggtgctggacgccaccgtatcaatctcccggtagtcgtcgctgttgctgataatgatcggggtcaccaggtcgtagccggcgtccagaatcgcctggcgatcaaactcaatcagcagatcgccggcctgtaccctgtcgccctctttcacatgcgcggtaaagggcacgccgtcgagtttgaccgtgtcgatgccgacgtggatcagcagctcaatgccgctgtcgctttgcaggccgatggcgtgtttagtctgaaacagggaggccacttcgcccgggaacggggcaatcacttggcccaccgccgggataatggcgacccctttacccagcaggccgctggcgaaggtgctatccggcacctgctcgagggcgataacgctgccgctcatcggcgccagaatatcgtttgccgaggccggggctaccgtcacggcgcccggtgcagcgctggcgcgcggcaggccggcgaagaaggtcagcacgcaggcgagcacgaaagccacgccggtgccgataagcccgccccagacgctggcgtcaatcccgccgggcgggatcatctgcgccgggaaaaagatattcggcacgccgaacgagtaagcatgactattactgaaggcggtgatcgccccgccgatggcgccggcgatacagccgaagataaacggacgacgcagcggcagggtcagaccatagatagccggctcggtgatgccaaacagccccgcagaaaaggcggaaccggccagcatccgctgacgcgcatcgcgggtggccagcaaaatccccagaaccgcccccacctgggcaatcaccgccggaagaataatcggcagcatggagtcgtgaccaagtaccgtcatgttgttgatcatcaacggcaccagcccccagtgcaggccgaaaataacgcacacctgccacatggcgcccagtaccgcgcccgccagccatggcgcaaacgcgtagataaactggtagccgttggccagcagatggctcagccaggtggcgaccgggccaatcaccaggaaggtgagcgggaccaccaccgccaggcagatcgccgggctgaagaagtttttcatcgatgacggcaacagcgcattgctcttgcgctccagccagcagcagacccatgaggcgagaataatcgggatcactgacgagctgtagttgataaaggtcaccggaatgccgagaaagtgctccaccgccgcgcccggcgcctggctggcttcaaaggcctgaatcatcaacgggtgggttaacgccccgccaatcaccatcgagataaacgggttgccgccaaacttcttcccggcggtatagccaagaaacagcgggaagaaaaaaaacagcgcgtcgctggcggcaaaccagattttataagtcccctgctccggcgtaagccagccgcaggtcaccgccagcgccagcaggcctttcagcagaccggttgccgccatcacgccgataaacggtgtaaagatgccggagatgatgtcgataagctggcttaacaccgatcctttggccgctttttcctcggcaaccggttcgttgtcatcgcttaaccccgcctcctggcgcaccgccagccagacgtcgtgaacgtggttgccaatcaccacctgaaactggccgccgctctccaccaccataatcacgcccggattggccttcagcccttcggcatcggctttgccgttatccttcagtttaaaacgcagacgtgtcgcacagtgaaccagactcacaatgttctctttgccgccgacgcggttgagaatatcctgcgcgagtgctttatattccatgctcttttccttactgccgctgcccgcagacaaccggcgactgagtagtaaaaaataaaaaaacccgagaaccacgccggtgggcgtcgcgctcaggttttgcctgcatcatgcagtaacaatccagttttgttggggagaattaacgcccctcttttcttacccgttcgatatgaatggcaagaaacataatttcttcggtggtcagcgaccgctgatactgcttttgcagatgcgtcgccaccgtttccgcacacttccacgctttggcgtagttatctttcaccgcgctgtgcagcgagacgtcgtcatcttccaccaccgtacgcgtcagcatccgctgggcgaaaaacttcaggtgggtgacgaaacgctgatagctcagcgactcttcatcgtagttaagctgcagctgatacttcaccagctgcaggatctcctgcatcacccgggttacgtgcatgacctccggcatttcgctgttgagctgcgccgtcaccagatgcagggcgataaatccggcttcatcctccgccagcttcacgccgagccttttggcaatgatggcccttgcctcctggcccagcgcgaactccttcggatacagccgcttaatctcccacagcagcacgttacgcagtgcgatgccctttttctgccgctcgatagcaaaatgacagtgatccgttaacgtgatgtacaaactttcctgtaacttgcccagccgtccgcgtgccaggtcgataatgcgatcgcaggtggtcatcacttctaacggtatttgactgagcagctcgcctaagcggccgaccagctcatcgctttgtaaggcgaaaactttttcaattttactgtcgtccagcacgtcgcccgggcgtttctgaaaggccagccctcgccccatcaccacctgttcgcgccggtgctcgtcgagaaccaccaccacattgttattgagtactttggcgatttgcatatagaccccagaaacaaaaaaacctgacccccgacgaaacgccaggtgatcaggttttgcctgccgcagcagttgcaatccaacacccgcactgtaacaacttctgctgcgcgctcaacctgacaagtgaaaaaacgtgattaagatcgcgactatcagaaggtcacgacggttttccactccactacccacgcgtcctgggtctgcgcgacgccgcccggacggtgccagtactgcaggcccggctgcagctccagccaggagaccgggcggaagcgataatagagttcaccgttcagcgaatgaccggccaccggctggtaagccggatcgttatagtcggtggcgccgcttatctgattcatatagcgctgattacgtgcgtagtggctgctcatgtcgatccacgtcaggccgaagccaatccagtcctccgggcgggcgtcaaacagaccgcggtagcgcatggaggcggcgacggcggagtggatatagttgctgcgctggtcgctgaggctgccgctcagtgagacgctcatcccccgcagcgggtcgtcggcgtggcgggtgatctgctggttcaggccggcgtacataaaccaggtgctatcgtgctcggcgtaaccttgcggatcggtcgccccggcgccgccggatttaccgctgtagaggtcgctctgcggcgcgttagtccagaccacgccaaggttataggctcccggcaggccattaatcagcggacgggtttcgatctccatcggcagtaagatgcctttgctacccttcgtcgaccagctccacgcgtggctgcgcgcggtagcctgcgggttttgctccatcaccccgcctttcagggtgaccgtcggcgtcagcttgtactccagggtggtgccccaggtgtgaatgttccagttattccaggtcagcgagttggccgatttcccaccgcactgggtcagcagctgaaaatcgcagggaatgatctggtcgaaggtttgcaccttgttcatcatgccgatgcgccaggtcaggcggcggtcgtcaaagctgcgggcaaaggtgagccagccaaggcgggtaatcgacccgccgccccagctctcctgcgatagatcgttgaaactcacccgcggatcctgcagccgtttcgtggtgagattatcatcgtggttgcggttgacgatgttgccttcgagacgcgcatccggtatgccggtccagcgctccagatcctgggtaaaggtcagcgccacctggtcaatataggccaggtgtttatcatggtcataaccgccgccggcgttgtaggccatctcgttaagatagccgagattataatgaaagccgttttcttcaaggatcggacgaatgcctagcatatcgcccagcagcccttgctgcccggcttcaaaccccagcgcgctgccgttccacgccgggatgtccgcggcgctcacggcaggcgccatggccgccagcatagcgccgatcaaaagctgatttatttttttgttatgcattgtgatatccaccgtgactgaataaaaacaaaggggatccccaggctatttatttacccgttttctttttttaaaaatgaatggcaaaaagcgtccgtcggtaataaaaccgcgacaatgccagagaaatcgttattcacatctcattgttttacatcatcattttatccaccctgaatttttaccaaaaaaaaacctaagcactttgcgccacgaatgacgaaagtgcttaggttttgcctgagttcagtagcaatcctgaattgattgaccgcacattatcactttattcaacccatgcctatcatcaacaggcatgcaagtaataatatgtgaagcgaataacagtatggcggttaatagcggccgatcgccgccgctatttcagcagacgtttgcagggcgcgaatttcattaaacagggtcagcgcctcggtatattccttgcgtaaatagcctaaccactgcttaattctcgccacatgatacaggccggtatcaccctgcttttccaggcgggtatatttttgcaacagctggaccacctgcggccacggcatgcgcggttcgttgtatttgatcacccggctgaggttcggcacattgagcgccccgcggccaatcatcaccgaatcgcagccggtgacagccatacaatcctgggcgctttgccagtcccagatttcaccgttggcgaccaccgggatagtcaggcgctggcggatctcgccgatcgcctgccagttgatgcgttcggctttgtagccatcttctttggtacggccgtgaaccaccagttcgctggcccccgcctgctgcaccgcgtcggcgatttcaaagcgccgttcaccgctgtcccagccaagacgaactttcaccgtcaccggcagatgctcgggaaccgcctctcgcatggctttcgcgccgcgatagatcaactctggatctttcagcagcgttgccccgccgccgctgccgtttaccagcttcgacggacagccgcagtttaaatccaccccccatgaacccagcgccaccgcgcgggcggcattttccgccagccactcgggatattgtcccagcagctggacgcgtacgcgggtgccggacggcgtgcggctctggtgatgcagttccgggcatagcctgtagaacgattttaccggcagcagttgatccaccacgcgcagaaattcggtgatgcagagatcgtaatcgttaacctcggtcagcagctcgcgcaccagcgaatcgagcacgccttccatcggcgccagtagaacacgcatatcgttacccggaaaaaaaagaggcgctatggtagcgcctccgggcgctggttgaaagcgctcaatgcgtcggaccagacgcacgccgttccccgcacgctcgatgcggcaaagcggcgagataatctctatgctttacagaggtctgtggcgtcccattcgcctttatttgccgcgcctcattcagcaaggtagcgtggggagcgatcccgcctgagccgcaaggtgtcgggccctgacgggtgagactatggttcccgtaagctatcagcgctatgcatagaattcatgatgtgatcggtagcacattttatggattaattgtatgatgaatgcacttcatcaagggttattaccatgagtaaatcgctgactattatctggcagtacctgcgggctttcgtcctgatttacgcctgcctgtacggcggaatttttatcgccgggctgctgcctatcactatccccggcagcatcatcggcatgctgatcctcttcgtgctgctggcgctgcaaattatgccgccgcaatgggtcaaccccggctgtaatatcctgatccgctatatggcgctgctgttcgtgccgatcggcgttggggtgatgcagtactgggatctgctgcgcgcccagctggggcctgtcgttatctcctgcgccatcagtacgctggtggtgtttgtagtggtgagctggagctcccatttggtgcatggcgaacgtaaagtgattggccaaaaaggaaaagaagaatgatgcatgaaatctggtggtcgctaccgctaaccctgatcgtcttttttctcgcccgcaaactggcggcccgctttaagttcccgctgctcaacccgctgctggtggcgatggtggtgattattccatttcttctgctgaccgggatctcctatgagcgttattttgccggcagcaaagtcctgaacgatctgctgcagccggcggtagtggcccttgcgttcccgctgtatgaacagctgcaccagatccgcgcccgctggaaatctatcattaccatctgctttatcggcagctgcgtggcgatgatcaccggcaccaccgtcgctctgctgatgggcgccacgccgcaaatcgccgcctctattctgcctaagtcagtcactacgccgattgctatggcggttagcggcagcatcggcggcattccggccatcagcgccgtgtgcgtaatttttgtcggcatcctcggcgcggtatttgggcatacgttgcttaacctgatgcgcattcgcaccaaagcgtcgcgcggcctgtcaatgggcaccgcctcgcacgccctcggcaccgcccgctgcgccgagctggactatcaggaaggcgcgtttagctcactggcgctggtgctgtgcgggatcatcacctcgttgatggcgccgttcttatttccgctgatcctcgcagtggtaggttaattgtgatttaaatcacatttcttaatgcaacaaatcagagttgcataaagaatgagatattcatcacatatggaaccgctggccgcccgtacactggcttcccattacactgttatgaggcaacgctatgcactcacgttttcaagctgctttgacgactctggcagcagatctgcaggcggccatcgccccgatgctcgccgacccgcatttcccggcgctgctcgaagccgatcaggtggcgacgctgcagcatgcgacaggtctggacgaagacgcgctggcttttgcgctactgccgcttgccgctgcctgcgcgcgccccgacctttctcattttaacgtcggggctatcgcccgcggcgtcagcggccgctggtactttggcggcaacatggagtttctcggcgctaccatgcagcagaccgttcacgcggaacagagcgccatcagccacgcctggctgcgcggcgagacctccctgcgcgctatcacggtgaattacacgccgtgcggtcattgccgtcagtttatgaacgaactgaacagcgggctggcgctgcgcattcatctgccgggtcgcgaagcgcatgccctggagcactatctgccggacgcctttggcccgaaagacctggagatcaaaaccctgctgatggatgaacaggaccatggctacccggtaagcggcgatgccctgacccaggcagctattcaggccgccaaccgctgccatgcgccctacagccactcgccttccggcgtggcgctggagctgaaagacggtaccattttcagcggtagctatgcggaaaacgcagcgttcaacccgacgctgccgccgctgcagggggcgctgaatctcctgagcctcaacggctatgattattccgctatccagcgggcaatcctggcggagaaagccgacgcggcgctgatccagtgggatgccaccgtcgccaccctgaaggcgctgggctgccacaatattgagcgcgtcctgttaggttgatcagcctgagcagattgccggacggcgtcttcggcttatccggccgactttttataccgttaggtgtcgggtggcgctacgcttacccgacctacggttcgcgccatggcgagctgaagatccctatgccgggtgtcggctcacgccttacccggcctgcattcggcgatctgtctatattgctgaaaatccccgcaatcaaacgcgggtttcttgcgcttacccggcgggtaaagtagcctgaagactccgttgtctattattgagccaagttcatgttaaagcgtgcgttctacagcctgttagtcctgctcggcctgctgctgttgaccgtgctgggccttgaccgctggatgagctggaaaaccgcgccctatatctatgatgaactgcaggacctgccctaccgtcaggtcggtgtggtgctgggcaccgccaaatattaccgcaccggcgtcatcaatcagtattaccgttaccgcatccagggtgcgctgaacgcctacaacagcggcaaggtcaactatctcctgctgagcggcgataatgctctgcaaagctacaatgaaccgatgaccatgcgtcgggacctgattaaaggcggcgtcgatcccgcggatatcgtactggactatgccggtttccgtaccctcgactcgatcgtccgtacccggaaagtgttcgacaccaacgacttcattatcatcacccagcgcttccactgcgaacgggcgctgtttatcgccctgcatatggggatccaggcccagtgctacgcggtgccgtcgccgaaggatatgtggagcgtgcggctgcgcgagttcggcgcccgctttggcgcgctggcggatctctatatcttcaaacgggaaccgcgctttctcggccctctcatcccgattccggcgcagcagcatgacgtgccggatgacgcccagtcctacccggccgtcaccccggagcagctgctggagctgcagaaagaaaagtagcctccatcaacgcattcgtttcagatataaaaaaacccgcgccaggcgcgggtttttgatgcgttcaatcttatttcttacgggcgtatttcagggagtccagcgccacggcgaagataataatcgcccccttaataatgtactgccagtaagggttgacgccgatataggtcaggccgtagttgatgacggtgaagataatcaccccggtcaccacgccaaacaccgtccctaccccgccgctgaacgatacgccgcccaccacacaggcggcgatggcgtccagttcgtacataaagccgaggttattggtcgccgaaccgatacgaccggcttccagcaggccgccgaaggcgtagaacacgccggagagggcatagatcatcagcaggtttaacgctacgttaaccccggagaccttcgccgcttccgggttaccgccgatagcgaaaatgtttttgccaaagcgcgtcttgttccacaggatccagacaaagaagacggcaatcagcgcgtagaaggtaatgtaggacaggcggaaggagcccagcgccacaaacccctgcgcgaaatgggagaagtggctgtcgaagccggagatcggcgacgcgcccacgaagtcgtagtacagcgagttaatgccgtagacgataatcatggtgccgagagtggtaataaacggcgtcacgttcaggtaggcaatgacgatcccgttaatcaggccgatgaccgccccgatggcgcacaccagcaggatcaccagcgggatcggcatggtcgccatatccgggaataccttattggcattatccaccgcctgcagcatggtggcggcaatcaccgccgccagacccacctgacggccggcggagaggtcggtcccctgcgtgacgataagtccggccacgccgagggcaataataatacgcaccgaggactgggtcagaatattactcaggttgagcagacttaaaaatgtcggatcctggaaaataataatggccagcaggaccagaaggacaacatatatcccaccctctttcaggtaagtgagaaaactctttttatttaacgcactcatgtgaagcccctgatcttaaaggtgcaatgacgcaagacgcagtatttcgttttgcgtagtggttttagtctcaacaatgcccgcgaccaggccgttgctcatcaccagaatgcggtcggtaatccccagcagttccggcatttcggaagaaataataatgatccctttgtcttttttagccagttcggcaatcagctgatagatttcaaacttggcgccgacgtcgataccgcgcgttggctcatccagcatcaggatctccggctgggtcagcagccagcggcctataatgaccttttgctggttaccaccggaaagcgagccaatctgcgtatgctgaccgggggttttgacgcgcatcgagtcaataacccattgggtatcgctcttcattcgcgagttatccagcaagccgacgctgtttttatatttcttaatattggagatcagcgagttaaacccgatatccagataggcgtaaatccctgtagagcgccgctcctcggtcaccagcgcaaaaccgtggtttatcgcctcgttggcgctgtggttgttgatcttctttccgtgcagcgtgatggtgccgctggccttctcacggatgccgaacagggtctccacgatgtcggtgcgtttagcgcccaccaggccggcgataccgagaatttcgcccttatgcaggtcaaaggagacatcgcgaatggagggctggcgcagcgaggtgagattgcgcacctggaggatcacttcgcccggggtgttttcgcgatccggaaaacgctggttaagcgaacgcccgaccatcatggcgatgatcttatccatatccagcccttccagcggctgggtggcgatccactggccgtcgcgcaggatggttatttcatcgcacaactggaaaatttcttccattttatgcgagatatagacgataccgcagccgcgatctttcagcttacggatgatcttaaacagatggttgacctctttttccgtcagcgatgacgtcggctcatccatgatgacgattttggcgtcataggaaaacgccttcgcgatctcaatcatctgcatctgagataccgataaggtaccgacgcgggcgcgcggatcgatatcaatatccagctcatcaaaaatggccttggtatcccggtacattttgtcctgatcgacaaacatgcctttagttggatagcgcccgagccacatgttatccatgaccgaacgctgtaataccaggtttaattcctgatgcaccatcgaaataccgttttccagggcttctttcgccgaatggaaatcgatctcttttccctgaaaaagaatgctaccggaatctttttgatagatcccaaaaaggcattttaataatgtcgatttaccggcgccgttctcacccattaacgcatgaatggagtgcggacgaaccttcaggttgacattatcaagagccttgacgccaggaaacgatttgttgatgttgctcatctccaacaaatattcgcctgaccgttcgctattattgctgaccatagttatacctggctgcgttcatgcaagccccgtccgacgcactagcgccagcaggagtctggttctgtatcaggaataatcgggcgtggataacccacgcccgcaactcacatcacgattatttgccggtaaactggctcaggttgtctttatcgacgcccacgtaggggacgcgaacaatcttgttgtcaattttccagttggtgcctgccgcggcgtctttcccgtcggcaaggtttttcgccagctcgaaggtcgctttcgcctggttattggcatcgttcagcacagtaccggccatcgcgccggatttcaccagcgccagggcttccggcagggcatcaacgccgaacaccggaatgctgctcttgttgtgcgctttcagcgcttcaaccgcgcccatcgccatggcgtcgttgttagcgatcaccacttcaatcttgttggcattcgggccggagagccaggcgtccattttgtctttcgcctgggcggtatcccacatcgcggtatccagctgcagctgctgggtcttcagacctttatcattcagctctttaataacgtaagtggtacgcgcttccgcatccggatggcccggctcgcctttcagcagaacgtactggatctgaccgtctttattcagatcccagttcgggttggctttccagtgcttggcgatcagatcgccctgaataatccccgactctttcgagtcggtaccgacgtaataagccttgtcataactatccagcgctttgcgggaaggctctttgttgaagaacaccaccggaatattctgcccgcgcgccttttcaatcaccgtacctgcggcggccgggtcaaccaggttaatcgccagcgccttcacgcctttcgccagcagcacgtcaatctgatcgttttgtttcgactggtcgttctgcgaatcattcatcaacagctggacgtctggcgcggatttgccatctttttcaatcgccttacgcactaccgacataaagttgtcgtcatatttataaatcgtcacgccgatacgggtatctgctgcgtgtgcggcggcaccaaataacagaccagccattacagcagacagggtaaacaccttcttattcatggaatctccggttttattatgcagggtcattattgtgagaaaatgcaggcgggatttgttgcattagtgttaccgcacaacgcatttcacgacgaaaattcggtcttccgtgtcgggtaacgctccagaaaaatacgactgtaaaactcgtttaacgccttgttcctactaaataaagtgaggaatatccatcacctcgtggttcagactggtaaacgctgccatcataatcaggcgaatgttaatatactgtgaatttactcacaaattgaaagcggttacatcccgcgatcgcgtcagttagtgatcggccccacagtttgccgctgggcaacggaatgacggcgcaccagcgtcggcataaagcagtgcgtcgcctcgcgatccagcttgccggccgcccccagcagcgccagctcggtggccagctttgccatcgacattaccggatagcgcacggtggtgagctgaggatcggtgtaacgggaaataggaatatcatcaaagccaatcagcgacagatgctgcggcacgacaatgccgttgtccttcagcgtcgtcagcgcgccggccgccatgctgtcgttataggcaaacaccgcggtgaggccgagattgcgccccagcagttcgaccatcgccgcttcaccgccctgcatatccggggagccggaaccgatccagctgtccggggcgatgatgccttgctcctgcagcgctttgctccacccttcccggcgcatatcgtcatcttcaatgccgtggtttgaggagagatagccgatgcgctggtgaccatgattgagcagcatacgggtggccatcagcgcgccgctgacgttgtcgagtccgacgcagcgatgggcataccccggcacgatacggttgatcagcaccatccccgggatatgttgcataaagtcgctcagttcatcatcgctcagcgctttcgaatggacgatcagcgccgagcagcgctgacggatcagcacctcgatggcgtgacgctctttttccgcctcgtgatagctgttgccgatcagcacatatttctgatgctgctgagcaacggtatccactgctttcaccagcgcgccgaagaaggcatcggagacgtccatcaccactacgccgatggtatcgctgacctgggtggccagcgcctgggcgttggcgttgggccggtagcccagttgggtcaccgctttcatcaccacgtcgcgcgtatccggactcaccagcgcgctgttattcagcacccgcgacacggtggccacggaaacgcccgcctggcgggcgacatcacgaatggtgatcatactcagcgaccttaagagaattacagcacgtcacattcacctcctgtgcttagcaaggaggctattctggcagcgacccgcggtccgctgcgtgagtgaggtcacacgactggaaacgtttacatccgttttgttaatgattgtgatcgagatcgttatctggatgtgtctttcaatgatgtgcctgacgcacgcagggttaactgacgccacagccattccaccggcccctggcggaagcggcgcagccagagcgatgagacaaggaggttaacggcccagatgggggggacaaaggccagcagctgcagacgatcgaagcgcataaacagcccaagatgataaaacagggtggtgcagatcagggtctgcagcaggtagttggtcagcgccatgcgtccgacgcaggcgatagcgcccaccaggcggaaacggcagagttgcggccagtagccccaggccagcgcggcatagccgatagcctgcagcggggcgctaagttcgcgcggcgcctgcagtaaaaacgcgcaccagcgatagtcccatgccagataccactgggcgaatattgccggcagattgaccgccatgccggccgccaccagcagcgcgccggtacgccggtagtgacgcaggctaaactgtcccttcagccagccgctgcgcatcagcgccgcgcccatcagcatcatccccgccagctgccagccatactgcgcgcccagcgccagcagattgtcagatagcatatccgcccggttgctgaccgcctccatgccaccgtgcagcttccagtactgctcatactgcaggttcgccgcgtccggcgcccacgagcgattcgccgcggtcccggagatcatccccaacaggaccagcaccgcaatgccggtgaggtagagcaccaccccggtgttgaacagcgatttgacatggtgcgcctcacgcaccatgcgccagctcaccagccccaccagggcataggccagcagaatatcgccatcccagaaaaaaagaccgtgaatgaaaccgagcagcgccagcagcgtcagccgcgactggatccagcgcttccctcgcggaagcaatagctgaagaccggcgccaaacagcagcgcgaacagggtgagaaacttcacctgcgccagcaggtcgaggagcgcccaggtccaggcatcgctaagggacgcgcttcctgaccaggcgggattgagataagcggccttcggcaagccgaaggcgctgatattgagaagcaggataccgaggatggcgacgccgcggacaaagtccagcgtgacatttctctccatgcaccctgctccgttttagtcgtggtgacgtactgcgcgcaggaattcctggcgggtattctggctggatttaaacaggccgccgagagaggtggtggtggtggcgctggtcgcgtcgcgaatgccgcgcgccttcacgcaataatgcaccgcgtcaatggataccgccacgttgttggtgccgagcagcgtctgcagcgcgatcaggatctgctgcgtcagacgctcctggacctgcggacgttgggcgaagaactgcacgatgcggttgattttcgacaggccgatcaccgaatctttcgggatataggctaccgtcgctttaccatcgatggtaacgaaatggtgttcgcaggtgctggtcagggtgatatcgcgcacggtgaccatttcatcgaccttcattttgttttcaatgacggtgattttcgggaagcgagaataatccagcccggagaagatctcatcgacatacattttggcgatgcgatgcggggtctccatcagactgtcatcactcagatccagattcagcagttgcataatctcggtcatatgaccggtaatcaaacgcttgcgtgtttcgttatcaatttcttgtactggcgcacgcatcggcgtctccagcccacgagcgaccagcgcttcatgaacgaggacggcttctttactcagtgatgacatttatgtttctcctgcaggtgtggcgctctttgctttttctgggggcaaagtttgtattcattgtgcgtgaggtggcgcacagaatccagtagccgtaacgataattattgaaattggcgctgccttttattagggagcgaagccatgcctcaggcgcgacgccaaatccttatcgccgtatccggaatgttccaaccgctgtacgcattcataagcgccgtcgctacaccggcatgttggctataagttgcattaatgatgcagtaagttctcaaaaggagaaagtgaaagttgctcaccggctaatgaaatatctgtattatgaacgtttacgcgcacatcccttccgaggagccttgcatggaactgcttgaagagcatcgctgttttgacggccagcaacaacgctggcgtcatcactcccctgtcctgaactgcgccatgacgttcagcatttttttaccgcctgagcgcgaaacgccgccgccggtgctgtactggctgtcggggctgacctgtaacgatgagaactttaccaccaaggcgggcgcccagcgcattgccgccgagctgggcatcgcgctggtgatgccggataccagcccgcgcggtgacgaggcggccaacgacgacggttacgatctcggacaaggcgccggcttctacctgaacgccaccgaggcgccctgggcggcgcactaccgaatgtacgattacctgcgtgacgaactgcccgcgcttattcgtagcgagtttagcgtcggcgaacgctgcgccgtcagcggccactcgatgggcggccacggcgcgctcattatggcgctcaaaaatcccggccgctacgccagcgtctccgccttcgcgccgatcgtcaatccctcccaggtcccgtggggcaagaaagcgtttaccgcctatctcggcgcggatgaatcggcatggcactcctgggacagctgcgcgctgatgcaggccagccggccggaggacgccgtgccgacgcttatcgatcagggcgacaacgatccattccttgccggacagctgcagccggcggtactggcggaggtcgcgcggcagaaggcctggccgttaacgctgcgcatccagcccggttacgaccacagctattacttcattgcctcgtttattgaagaccatctgcgcttccatgcgcagcatctctttggctaaacgccaatgcgccgcgaagctgcttcgcggcgcatgttcaggcctacaggacgcgttttagcgccggcaatcagaagcgataatccaccgccataaagtagcgacggccttcttcggtatagctgtagtcgtcccggctcagatctttatcacccacgttctgcaccccggagcgcagtttcacgtttttggtcacctgccatgccgcgccaacgtcaaacagggtgtagccgcccggcgttttgccggtggcgctcaccgcgcgctgctggccggtatagttggccgtcacgtagaaggaccaatcgtccagcggtttccagtcgagcgtgccgttggcggtatggaacggcagcgtctgcagcggtttgttgccgccattgctcagatcgcgaccatcgttgtaggtgtagttcaccgtcagcttccactcatcgccaaacgggatcttcacctccgtctccacccctttgatgcgggctttgttgacgttgaaatagcggaagatcggcacgcgcttgccgttgacggttttccagccgacaaagttcgggtagcccggcgcttcgctggcgctggaggtgcgcagaacatcgatcatgtcgtcgacattattctggaaggtggtgatgctgccttcgacattttcaagccagccctcttccccgcggtagtagagaccgagctcgaagctttcgctggtttccggtttcagatccgggttaccgacgatgctgcacgagccgcggcaggagttggtggtccagtcggggttaagctgcagcagcgacggggctttaaacgccgtcgcccagccgcctttgacggtgacggtatcggtggcgttatacaccagataggcgcgcgggctccagtgatcgccataggtctgatggtcgtccatacgaatgccggtggtcagcgccagcggctcgatgatgcgccattcgtcttcgataaacagggcgtactggctggccgacgttgactggccgccgctgctcaggttgaccggatctttcagtttgtcgtggcgccattcgccgccgaaggtcaccagctggttaatcatgcccagcggcaggacatacttgccgtcgatggcattgctttccgaggtaatagtcccgctctgccctggatttttgttatccaccttttcgccgtagaacttgagctcgctattgccgatatcccagcggccgttatggctcagagagtagttctcccgctcaaggcggttgcggtcaagggaatcggaatcgcgatcctgacggtcaaagccgtagcctgcggtaaaatcgtggttttcgttcggcgtccaggcgaattcaacattgccatcgcggctggtgaagccctcgatgcgcggcgtctcgccggtggcattactggatgactgcggatcgtccttggcgcgttttgccaggctgccgtaggccttcattccaagtacgccgtcgatcagcgggccgctggtgaagaactggccgttataggtatccccgcgatcgcggtgctcctgaatagtggtatcagcactcagcgtcccggtccatttctggccgatttttttggtaataatgttgaccaccccaccgagcgcatcggagccgtaaagggaggacatcgggccgcgcaccacttcgatacgctcaatagcatccaccgggatccagttaaggtcgaagtcattgtggcggaagacggcgttccgcgagttaacgcgcttgccgtcgaccaggatcagggtatagctgctgctcagaccgcggatgctaacgcccttgcggttatccccttcgttggtgagctggaccccaggcacatcgcgcagcacgtctttcaggttctgaacaggcttgcgttgtaaatcctgttgggtgatgacgctgatgctcgccggcgcgtctttgacattctgttcagtggccgaggcggtcaccaccagcgtttcttcattcacatcggccagagccggaaacgccaacgatacgacggacgcagacaatcccgcccggataaaagggtttaacctgaacattccaaatctccatgaggtgtacaaccaaacaaacaacaaggtgctgctcacacgcgctggcggcttgccgctctgtcggcggcatgctcgcgctgttttctcgtcgatgtggctggtcgcccggtgtcagtctgtacaagcggcagagacggggagtggcttcatccgtaatgggcgaaaatgataaagataatgattacgattatcaatataattatgaagaattgtgacaagctgtaaccgcacaaacataaaaaaagccctctgttcagagggcttgcgggtgatgacaaatctgtcttcgttattgtgctcacatgtctgccgggtggcggcttccgccttaccaggcctacgaaacatcgcaatatcaatcagttacgcggttatctgtaggcccgcgcaagcgcatggactgaccccataaagttggatggttcatattaagcggctctcagagcctgggttcggtactctaccggactcaggccttttaatttcaggcttatccgctcgttgttgtagtaatggatatagtcctctacggcttttcttagcgcactgacactcctgaactccctcagataaaaacactccgatttcagggtcccgaagaagttttccatcactgcattatccaggcagtttcctttacgcgacatactctgcgtcatcccatgcgcctttaaacgttcctgatagctcctcatcctgtaatgccagccctgatccgagtgcagcagcggagcatctcccggtctgagcttcgggaacgcaccgtccagcatcgtattcaccatctccatcaccggcctttccgacaggctgtaggcgataacctcccggttaaacagatcgagaactgacgacaggtaaagcttttttccctgtaccgggaactctgtcacatctgttacccatttttcgttggcttttgacgcaccgaagttccggctcaggatattgggcgcggcctcgcccgttctccctttccaggcacgatattttttcgcccttatcatagaccggagtgacagttctgccatcagccgctgcactgttttatggtttatccgcagcccctgttttctcagtgcgagcgtgatcctgcggtagccataacgacctttgtgatagtggtatatcttcctgatgttctctttaagacccgcatacctgtccccttgcttcagtgcattcatattgtaataccacgtgctacgggacataccggccgcccgcagaaggtcccgcagagcgtgttcatgccttagttcactgattatcagggctttttgccatttttttcgctctgaaccaaggctttcaacttttttagataggcattctctgcccgcagataacgcagttcggccctgagctcttcgggggagagtttttccagctctttatctgtcagtggtgggatattttttggctttgtcatttgtccgggccgtccgcattgcatgtttaaaagaccttccgctccggcatcgttgtacacgtcgagccagcgccggacaagtatttctgcggagagattaaaccgggcagccgcttcacgcatcgtcaggcggtcactgataaccgcccggacgaccacgagtttaaattcatcggaataatgattattttttgcagtcaggccttctgcaccgtggaactgccatgccctgacccagcgacggacagatgttctttcaataccaaaaaggtcggctgtactctgttctccgtctttaccggacaaataatgattaaccacagccagttttgtttcaggggaatactttggtttagccataaaattgcaccttactcagttgggtgtccaacttttggggtgcagtccagcagcgcagccgggcaatccctgaagattgcactttgccagcaatataaagccctcttcacagagggcttttatcgcacaatcgcgaagattaacgcttaaagcggtccgggaaggtcatttcgctgtagcgaacaaagcgggtgcctttcgccagcttgtaaccaaaccagataacgaggaacagcggaataccaatgtaggtcgccgccacgccgccccagtcaatggtgtccttgaggaacgcttcgtagttctgtccgagagtaatgatcaagcacagcacgaaggcgaagatcggccccagcgggaagaacccggaacgatacggcagattattaatatcgttaccctgcaggacgtagccgcgacggaaacgatagtggctgatcgcaatacccagccaggcgataaagcccgtcatcccggaggtgttcagcagccacaggtacaccgtctggttgccaaacatggaagtcaggaagcacagcgccgcgatcacggtggtcgcgtacagcgcgttacgcggcacgccgccacgcgacagcttcgagaaaatacgcggcgctttaccgtcgcaggccagggtgtacagcatacgcgtggaggcgtacatcccggagttacccgccgacagcacggcagtcaggataacggcgttcatgattgccgccgccgacagcaaaccagcatgctggaacaccagggtgaacgggctgacggagatatccttcacatcgttgcgcagcagactcggatcggtatacggaatgatcaggctgataatcaggatcgcgaagacgtaaaacagcaggatacgccagaagacctggcgcaccgcgcgcggaatgttcttctccggattttcagattcaccggcagcgatgccgataagctcggtgccctggaacgagaagccgacaatcatcgccacgccaatcatcgccgagaaaccgccggcgaacggcgcatccgcgatcccccagttgctccagccggctggctgcgcccctttgaagatgccgacaatcatcatcacgccgacgatgataaagataatgacggtggctacctttatcagcgagaaccagtattccgcctcgccaaagccgcgcaccgagatccagttcagcaggaacatgatgccgaggaataaggcgctccagatccagcccggagtgtcggggaaccagtagctcatcaccagctgtgaggccacgaggtcaacggcgatcgtcaccgcccagttgtaccagtagttccagcccagcgcgaagccgaagccttcttcaacataattctgcccgtaggtggcgaaggaaccggataccggcataaacgccgccagctcgccgaggctggtcatcaggaaatagaccatcaaaccgatcagaatataagacagcagcgccccgccgggacctgcttgcgaaatggttgcgccagaggcaacaaaaagacccgtaccgatggaaccgccgatggcgatcatggtcaagtggcgcgccttcagttcacgacgtagcgtgggcgcttctgtggttttagtttccgaaaccatgtgataatgctatccatccaaaaaatgaggcgcgattgtagcagacgatcggggttccatccggtacaaatgcaaagttataagagagcttcatgatcgcccgcaaattattagtaaagcactaacctgcggaattgccagcgaattccccccgtaatcaggcgataaaaccgggctgctacacctggcaatagtgcagaaaacgttgtaatgctttagaaatatgcttctgccggtgatggatccgccacagcgtgcgcgtcagccggggcaatggcactttcagctccgccagcgtgcccgaggcaagctgttcggcaatcacccgccgcgatagacagctgatgcccaggccatgcctgaccgcgtgcttgatcgcctctgaattacccagctccatgcccagatgaaacgccggcagatgcgacagcagaacgtaatcgacaatctcccgggtgccggagccatgctcgcgcaggatccacggcgcctcagccagttgctgcagggtcacctcccccgccagcagcggtgagttgggcgcggcaaacaccaccagttcatcctccagccacggctcggcaataatatcggcggcatggcacggcccctcaatcaggccgaaatccacccgcaggtcggcgacggcgttgatgacgtccaggctgttgccgacgctcagctcgaccggcagatccgggaagtcatgacgatagcgggcaataatctccggcataatatagttgccgatggtgctgctggcgtagactcggatcgccccgttatcgccgcgaaacagctgctcgatctccagggcccgctccagcagcgccagcgcacgcgggtacagcagccgtccatgctcattcaccaccagtcgtttaccgacgcggtcaaacagctgcacgccgagctgcccttccagatcggtcagcgcggcgctgaccgcggattgcgaaagcgccagcatctgtgacgcctgagtggtcgacccactcttgtggacttcggcgaacacttccagctgccgcagcgtaatatgcataacccacccgtttagtaatccaacctgaataaccttccttactatggtgacacaaatcgaggcggctgacggaaggaaaatccgcttatatcacaaaatcatcgtcttgccggcgagaccgccccgcttctgcctaacccgctctcgccccgttgtaaccggcgaagcggccattaaccacttattacgattgattataaacatataatcaattttatatttaatcccgcgcggcgtaacctttaggcagacaaaggagaaggttatgacagcactcactttacccaccaaacatcgttccctgtggcattttgtcccaggcctggcgctgactgccgctctgaccggcgccgccctgtgggccggtagtttcccggccatcgccggcgcaggctttagcgccctgaccctcgctatcctgttcgggatggtcgtcggcaacacggtctacccgaaaatctggcagccctgcgacggcggggtgatcttcgccaagcagcatctgctgcgcctggggatcatcctctacggctttcgcctgacgttcgcccagattgccgacgtcggcgtgagcggtattttgattgacgttctgacgctctccagtaccttttttatcgcctgcttccttggccagaaagtgtttggtctcgataaacacaccagctggctgatcggcgccggcagcagcatctgcggcgcggcggccgtgctcgccaccgagccggtggtcaaagccgaagccagtaaagtgacggttgccgtcgccacagtggttatcttcggtaccatcgccatcttcctctacccggcgatgtacccgctgctggcgcactggtttaccccggagacctacgggatctatatgggctccaccatgcatgaagtggcgcaggttgttgccgccggccatgcggtcagcccggacgcggagaacgcggcggttatcgccaaaatgctgcgcgtcatgatgctggctccgttcctgctgttcctggcggcgcgtgttaaacagctgaccccggcaggcaacggcgagaaaagcaaaatcaccattccgtggttcgccattatgttcatcctggtggcggtgtttaactccttccatctgctgccgaaagccgtggtggatatgctggtgacgctggataccgtcctgctggcgatggcaatggccgccctcggggtcaccacccacgtcagcgcgctgaaaaaagccggggcgaaaccgctgctgatggcgctgatgctgttcgtctggttgattgtcggcggcggggtcattaacgtcgctatccacagcctgatggcataaagcactacatctttctccagttaagccgctatcattacccaccccccagcggctttaactggagtttttttatgaaatacgtaggagcgcacgtgagcgcctcaggtggactggccaatgccgccattcgcgccgccgaaatcgaagcaaccgccttcgccctcttcaccaagaaccagcgccagtggcgcgccgcgccgctcagcgacgagaccatcgccgaattcaaagccgcctgtgaaaagtatcactttggcccggggcagatcctgccgcacgacagctacctgattaaccttggccacccggtggaagaagcgctggaaaaatcccgtgatgccttcattgatgaaatgacccgctgccagcagctggggctgacgctgctcaacttccaccccggcagccatctgcagcagatcccggaggaggagtgcctggcgcgcatcgccgaatcgatcaatatcgcgctggcgaagaccgaaggcgttactgcggtgatcgaaaacaccgctggccagggcagcaacctcggctttaagttcgagcacctcgcggccatcatcgacggcgtggaagataaatcccgcgtcggcgtctgcattgatacctgccatgctttcgccgccggctacgacctgcgcagcgccgaagcctgcgaaaaaaccttcgccgccttcgaacgcatcgtcggttttcagtatctgcgcggcatgcatctcaacgatgccaagagcgccttcggcagccgggtcgaccgtcaccacagcctgggggaaggcaacatcggccacgattgcttcagctggatcatgcaggacagccgcttcgacggtattccgctgattcttgaaaccatcaacccggatatctgggcggaagagattgcctggctgcgggcgcagcagattgccgaagtggcgtaaatagagacaaaaaaagggccgaacagtcggcccttttttattgcggtaggattatgccgctttttcaacttccgctgtttgcgcctcagggcgtttcagcacggcgtaggcaaggcccgccaccagcgttccggcaacaatcgccagcaggtag
